(19) United States
(12) Patent Application Publication
(10) Pub. No.: US 2003/0147875 A1
(43) Pub. Date: Aug. 7, 2003

(54) Sulfatases and methods of use thereof

(76) Inventors: Steven Rosen, San Francisco, CA (US); Stefan Hemmerich, San Francisco, CA (US); Megumi Tomita, San Francisco, CA (US)

Correspondence Address: BOZICEVIC, FIELD & FRANCIS LLP, 200 MIDDLEFIELD RD, SUITE 200, MENLO PARK, CA, 94025, US

(21) Appl. No.: 10/265,071

(22) Filed: Oct. 3, 2002

Related U.S. Application Data
(63) Continuation-in-part of application No. 10/025,966, filed on Dec. 21, 2001.
(60) Provisional application No. 60/258,577, filed on Dec. 27, 2000.
(60) Provisional application No. 60/267,831, filed on Feb. 9, 2001.

(51) Int. Cl. A61K 38/46; C12Q 1/68; G01N 33/574; C07H 21/04; C12N 9/16; C12P 21/02; C12N 5/06

(52) U.S. Cl. 424/94.6; 435/7.23; 435/6; 435/196; 435/320.1; 435/325; 536/23.2; 530/388.26

(57) ABSTRACT

Novel sulfatases and polypeptides related thereto, as well as nucleic acid compositions encoding the same, are provided. The subject polypeptides and nucleic acid compositions find use in a variety of applications, including various diagnostic and therapeutic agent screening applications. Also provided are methods of inhibiting tumor-induced angiogenesis and methods of treating disease conditions associated therewith, particularly by administering an inhibitor of a subject sulfatase.

### CROSS-REFERENCE

[0001] This application is a continuation-in-part of U.S. patent application Ser. No. 10/025,966, filed Dec. 21, 2001, which claims the benefit of U.S. Provisional Patent Application No. 60/258,577, filed Dec. 27, 2000, and U.S. Provisional Patent Application No. 60/267,831, filed Feb. 9, 2001, which applications are incorporated herein by reference in their entirety.

### STATEMENT REGARDING FEDERALLY SPONSORED RESEARCH

[0002] This invention was made with Government support under Grant No. GM23547, awarded by the National Institutes of Health. The United States Government has certain rights in this invention.

### FIELD OF THE INVENTION

[0003] The present invention is in the field of sulfatase enzymes.

### BACKGROUND OF THE INVENTION

[0004] Sulfatase enzymes are involved in a variety of physiological processes, including development, metabolism, and inflammation. For example, the developmental signaling functions of cell surface heparan sulfate proteoglycans (HSPGs) are dependent on their sulfation states. Human lysosomal arylsulfatase A is a prototype member of the sulfatase family. Glucosamine-6-sulphatase is an exo-hydrolase required for the lysosomal degradation of heparan sulphate and keratan sulphate. These enzymes require the posttranslational oxidation of the —CH₂SH group of a conserved cysteine to an aldehyde, yielding a formylglycine. Without this modification sulfatases are catalytically inactive, as revealed by a lysosomal storage disorder known as multiple sulfatase deficiency. For example, deficiency of glucosamine-6-sulphatase activity leads to the lysosomal storage of the glycosaminoglycan, heparan sulphate and the monosaccharide sulphate N-acetylglucosamine 6-sulphate and the autosomal recessive genetic disorder mucopolysaccharidosis type IIID.

[0005] Others have isolated and identified a glycosulfatase that removes the sulfate moiety from mucous glycoprotein. Further, others have isolated and specifically identified human glucosamine-6-sulfatase and obtained cDNA coding for such. Finally, others isolated and specifically identified N-acetylgalactosamine-6-sulfate/galactose-6-sulfate sulfatase.

[0006] Angiogenesis and vasculogenesis are processes involved in the growth of blood vessels. Angiogenesis is the process by which new blood vessels are formed from extant capillaries, while vasculogenesis involves the growth of vessels deriving from endothelial progenitor cells. Angiogenesis and vasculogenesis, and the factors that regulate these processes, are important in embryonic development, inflammation, and wound healing. However, angiogenesis and vasculogenesis also contribute to pathologic conditions such as tumor growth, diabetic retinopathy, rheumatoid arthritis, and chronic inflammatory diseases (see, e.g., U.S. Pat. No. 5,318,957; Yancopoulos et al. (1998) Cell 93:661-4; Folkman et al. (1996) Cell 87;1153-5; and Hanahan et al. (1996) Cell 86:353-64). For example, generation of new blood vessels in the vicinity of a tumor allows the tumor to grow and, in come cases, metastasize.

[0007] Several angiogenic and/or vasculogenic agents with different properties and mechanisms of action are well known in the art. For example, acidic and basic fibroblast growth factor (FGF), transforming growth factor alpha (TGF-α) and beta (TGF-β), tumor necrosis factor (TNF), platelet-derived growth factor (PDGF), vascular endothelial cell growth factor (VEGF), and angiogenin are potent and well-characterized angiogenesis-promoting agents.

[0008] Despite the availability of therapies to treat cancer, ischemic conditions, and inflammation, a need exists for additional ways to combat these disorders. The present invention addresses this need.

[0009] Literature

[0010] Parenti et al. (1997) Curr. Opinion Genet. Devel. 7:386-391; Bergers et al. (2000) Nature Cell Biol. 2:737-744; Lukatela et al. (1998) Biochem. 37:3654; Knaust et al. (1998) Biochem. 37:13941; Robertson et al. (1992) Biochem J. 288:539; Robertson et al. (1993) Biochem J. 293:683-689; Robertson et al. (1988) Biochem. Biophys. Res. Commun., 157:218-224; Tomatsu et al. (1991) Biochem. Biophys. Res. Commun. 181:677-683; Folkman et al. (1992) Seminars in Cancer Biology 3:89-96; Dhoot et al. (2001) Science 293:1663-1666. U.S. Pat. Nos. 5,925,349; and 5,695,752. International Patent Applications WO 98/53071; WO 99/54448; WO 99/63088; WO 00/06086; WO 01/00828; WO 01/02568; WO 01/40269; WO 01/42467; WO 01/59127; WO 01/57058; WO 01/21640.

### SUMMARY OF THE INVENTION

[0011] Novel sulfatases and polypeptides related thereto, as well as nucleic acid compositions encoding the same, are provided. The subject polypeptide and nucleic acid compositions find use in a variety of applications, including diagnostic applications, and therapeutic agent screening applications, as well as in treatment of a variety of disease conditions. Also provided are methods of modulating sulfatase enzymatic activity and methods of treating disease conditions associated therewith, particularly by administering inhibitors of the novel sulfatases.

### BRIEF DESCRIPTION OF THE DRAWINGS

[0012] FIGS. 1A (1Ai and 1Aii) and 1B provide the cDNA sequence and amino acid sequence, respectively, of human SULF1. The full length cDNA sequence is SEQ ID NO:01, the open reading frame is set forth in SEQ ID NO:02, and the amino acid sequence of the protein encoded by the open reading frame is SEQ ID NO:03.

[0013] FIGS. 2A (2Ai and 2Aii) and 2B provide the cDNA sequence and amino acid sequence, respectively, of human SULF2. The full length cDNA sequence is SEQ ID NO:04, the open reading frame is set forth in SEQ ID NO:05, and the amino acid sequence of the protein encoded by the open reading frame is SEQ ID NO:06.

[0014] FIGS. 3A (3Ai and 3Aii) and 3B provide the cDNA sequence and amino acid sequence, respectively, of mouse SULF-1. The full length cDNA sequence is SEQ ID NO:07, the open reading frame is set forth in SEQ ID NO:08, and the amino acid sequence of the protein encoded by the open reading frame is SEQ ID NO:09.

[0015] FIGS. 4A (4Ai and 4Aii) and 4B provide the cDNA sequence and amino acid sequence, respectively, of mouse SULF-2. The full length cDNA sequence is SEQ ID NO:10, the open reading frame is set forth in SEQ ID NO:11, and the amino acid sequence of the protein encoded by the open reading frame is SEQ ID NO:12.

[0016] FIG. 5 is a graph depicting the numbers of human SULF1 expressed sequence tags (ESTs) in normal and tumor tissue libraries.

[0017] FIG. 6 is a graph depicting the numbers of huSULF1 ESTs in various tissues.

[0018] FIG. 7 is a graph depicting the numbers of human SULF2 expressed sequence tags (ESTs) in normal and tumor tissue libraries.

[0019] FIG. 8 depicts the results of SAGE analysis of huSULF-1 in normal and cancer tissues.

[0020] FIG. 9 depicts the results of SAGE analysis of huSULF-2 in normal and cancer tissues.

[0021] FIGS. 10A (10Ai and 10Aii) and 10B provide the cDNA sequence and amino acid sequence, respectively of human SULF-2. The full length cDNA sequence is SEQ ID NO:13, the open reading frame is set forth in SEQ ID NO:14, and the amino acid sequence of the protein encoded by the open reading frame is SEQ ID NO:15.

[0022] FIGS. 11A (11Ai and 11Aii) and 11B provide the cDNA sequence and amino acid sequence, respectively of mouse SULF-2. The full length cDNA sequence is SEQ ID NO:16, the open reading frame is set forth in SEQ ID NO:17, and the amino acid sequence of the protein encoded by the open reading frame is SEQ ID NO:18.

[0023] FIG. 12 depicts exon start and end sites, and exon length for human SULF2 gene exons.

[0024] FIG. 13 is a schematic representation of human sulf-1 and sulf-2 protein domain.

[0025] FIG. 14 is a schematic representation of an activity of a subject sulfatase.

[0026] FIGS. 15A-D depict arylsulfatase activity of expressed sulfatases, and lack of sulfatase activity in Hsulf mutants.

[0027] FIGS. 16A-F depict endo-glucosamine-6-sulfatase activity of expressed sulfatases.

[0028] FIG. 17 depicts pro-angiogenic activity of hsulf-2.

### DEFINITIONS

[0029] The terms “polynucleotide” and “nucleic acid molecule” are used interchangeably herein to refer to polymeric forms of nucleotides of any length. The polynucleotides may contain deoxyribonucleotides, ribonucleotides, and/or their analogs. Nucleotides may have any three-dimensional structure, and may perform any function, known or unknown. The term “polynucleotide” includes single-, double-stranded and triple helical molecules. “Oligonucleotide” generally refers to polynucleotides of between about 5 and about 100 nucleotides of single- or double-stranded DNA. However, for the purposes of this disclosure, there is no upper limit to the length of an oligonucleotide. Oligonucleotides are also known as oligomers or oligos and may be isolated from genes, or chemically synthesized by methods known in the art.

[0030] The following are non-limiting embodiments of polynucleotides: a gene or gene fragment, exons, introns, mRNA, tRNA, rRNA, ribozymes, cDNA, recombinant polynucleotides, branched polynucleotides, plasmids, vectors, isolated DNA of any sequence, isolated RNA of any sequence, nucleic acid probes, and primers. A nucleic acid molecule may also comprise modified nucleic acid molecules, such as methylated nucleic acid molecules and nucleic acid molecule analogs. Analogs of purines and pyrimidines are known in the art. Nucleic acids may be naturally occurring, e.g. DNA or RNA, or may be synthetic analogs, as known in the art. Such analogs may be preferred for use as probes because of superior stability under assay conditions. Modifications in the native structure, including alterations in the backbone, sugars or heterocyclic bases, have been shown to increase intracellular stability and binding affinity. Among useful changes in the backbone chemistry are phosphorothioates; phosphorodithioates, where both of the non-bridging oxygens are substituted with sulfur; phosphoroamidites; alkyl phosphotriesters and boranophosphates. Achiral phosphate derivatives include 3′-O′-5′-S-phosphorothioate, 3′-S-5′-O-phosphorothioate, 3′-CH2-5′-O-phosphonate and 3′-NH-5′-O-phosphoroamidate. Peptide nucleic acids replace the entire ribose phosphodiester backbone with a peptide linkage.

[0031] Sugar modifications are also used to enhance stability and affinity. The α-anomer of deoxyribose may be used, where the base is inverted with respect to the natural β-anomer. The 2′-OH of the ribose sugar may be altered to form 2′-O-methyl or 2′-O-allyl sugars, which provides resistance to degradation without comprising affinity.

[0032] Modification of the heterocyclic bases must maintain proper base pairing. Some useful substitutions include deoxyuridine for deoxythymidine; 5-methyl-2′-deoxycytidine and 5-bromo-2′-deoxycytidine for deoxycytidine. 5-propynyl-2′-deoxyuridine and 5-propynyl-2′-deoxycytidine have been shown to increase affinity and biological activity when substituted for deoxythymidine and deoxycytidine, respectively.

[0033] The terms “polypeptide” and “protein”, used interchangebly herein, refer to a polymeric form of amino acids of any length, which can include coded and non-coded amino acids, chemically or biochemically modified or derivatized amino acids, and polypeptides having modified peptide backbones. The term includes fusion proteins, including, but not limited to, fusion proteins with a heterologous amino acid sequence, fusions with heterologous and homologous leader sequences, with or without N-terminal methionine residues; immunologically tagged proteins; and the like.

[0034] A “substantially isolated” or “isolated” polynucleotide is one that is substantially free of the sequences with which it is associated in nature. By substantially free is meant at least 50%, preferably at least 70%, more preferably at least 80%, and even more preferably at least 90% free of the materials with which it is associated in nature. As used herein, an “isolated” polynucleotide also refers to recombinant polynucleotides, which, by virtue of origin or manipulation: (1) are not associated with all or a portion of a polynucleotide with which it is associated in nature, (2) are linked to a polynucleotide other than that to which it is linked in nature, or (3) does not occur in nature.

[0035] Hybridization reactions can be performed under conditions of different “stringency”. Conditions that increase stringency of a hybridization reaction of widely known and published in the art. See, for example, Sambrook et al. (1989). Examples of relevant conditions include (in order of increasing stringency): incubation temperatures of 25° C., 37° C., 50 C. and 68° C.; buffer concentrations of 10×SSC, 6×SSC, 1×SSC, 0.1×SSC (where 1×SSC is 0.15 M NaCl and 15 mM citrate buffer) and their equivalents using other buffer systems; formamide concentrations of 0%, 25%, 50%, and 75%; incubation times from 5 minutes to 24 hours; 1, 2, or more washing steps; wash incubation times of 1, 2, or 15 minutes; and wash solutions of 6×SSC, 1×SSC, 0.1×SSC, or deionized water. An example of stringent hybridization conditions is hybridization at 50° C. or higher and 0.1×SSC (15 mM sodium chloride/1.5 mM sodium citrate). Another example of stringent hybridization conditions is overnight incubation at 42° C. in a solution: 50% formamide, 1×SSC (150 mM NaCl, 15 mM sodium citrate), 50 mM sodium phosphate (pH 7.6), 5× Denhardt's solution, 10% dextran sulfate, and 20 μg/ml denatured, sheared salmon sperm DNA, followed by washing the filters in 0.1×SSC at about 65° C. Stringent hybridization conditions are hybridization conditions that are at least as stringent as the above representative conditions. Other stringent hybridization conditions are known in the art and may also be employed to identify nucleic acids of this particular embodiment of the invention.

[0036] “Tₘ” is the temperature in degrees Celsius at which 50% of a polynucleotide duplex made of complementary strands hydrogen bonded in anti-parallel direction by Watson-Crick base pairing dissociates into single strands under conditions of the experiment. Tₘ may be predicted according to a standard formula, such as:

Tₘ=81.5+16.6 log[X⁺]+0.41(%G/C)−0.61(%F)−600/L

[0037] where [X⁺] is the cation concentration (usually sodium ion, Na⁺) in mol/L; (%G/C) is the number of G and C residues as a percentage of total residues in the duplex; (%F) is the percent formamide in solution (wt/vol); and L is the number of nucleotides in each strand of the duplex.

[0038] A polynucleotide or polypeptide has a certain percent “sequence identity” to another polynucleotide or polypeptide, meaning that, when aligned, that percentage of bases or amino acids are the same when comparing the two sequences. Sequence similarity can be determined in a number of different manners. To determine sequence identity, sequences can be aligned using the methods and computer programs, including BLAST, available over the world wide web at http://ww.ncbi.nlm.nih.gov/BLAST/. Another alignment algorithm is FASTA, available in the Genetics Computing Group (GCG) package, from Madison, Wis., USA, a wholly owned subsidiary of Oxford Molecular Group, Inc. Other techniques for alignment are described in Methods in Enzymology, vol. 266: Computer Methods for Macromolecular Sequence Analysis (1996), ed. Doolittle, Academic Press, Inc., a division of Harcourt Brace & Co., San Diego, Calif., USA. Of particular interest are alignment programs that permit gaps in the sequence. The Smith-Waterman is one type of algorithm that permits gaps in sequence alignments. See Meth. Mol. Biol. 70: 173-187 (1997). Also, the GAP program using the Needleman and Wunsch alignment method can be utilized to align sequences. See J. Mol. Biol. 48: 443-453 (1970)

[0039] Of interest is the BestFit program using the local homology algorithm of Smith Waterman (Advances in Applied Mathematics 2: 482-489 (1981) to determine sequence identity. The gap generation penalty will generally range from 1 to 5, usually 2 to 4 and in many embodiments will be 3. The gap extension penalty will generally range from about 0.01 to 0.20 and in many instances will be 0.10. The program has default parameters determined by the sequences inputted to be compared. Preferably, the sequence identity is determined using the default parameters determined by the program. This program is available also from Genetics Computing Group (GCG) package, from Madison, Wis., USA.

[0040] Another program of interest is the FastDB algorithm. FastDB is described in Current Methods in Sequence Comparison and Analysis, Macromolecule Sequencing and Synthesis, Selected Methods and Applications, pp. 127-149, 1988, Alan R. Liss, Inc. Percent sequence identity is calculated by FastDB based upon the following parameters:

[0041] Mismatch Penalty: 1.00;

[0042] Gap Penalty: 1.00;

[0043] Gap Size Penalty: 0.33; and

[0044] Joining Penalty: 30.0.

[0045] One parameter for determining percent sequence identity is the “percentage of the alignment region length” where the strongest alignment is found.

[0046] The percentage of the alignment region length is calculated by counting the number of residues of the individual sequence found in the region of strongest alignment. This number is divided by the total residue length of the target or query polynucleotide sequence to find a percentage. An example is shown below:

| Target sequence: | ababadddcdbcbdbcbadaa |
|---|---|
| | \| \|\|\| \|\|\|\| \|\|\| |
| Query sequence: | cdcdabbbcdb.bdbcdadacbb |
| | 1 5 10 15 |

[0047] where a=guanine; b=cytosine; c=thymine; and d=adenine.

[0048] The region of alignment begins at residue 9 and ends at residue 19. The total length of the target sequence is 20 residues. The percent of the alignment region length is 11 divided by 20 or 55%, for example.

[0049] Percent sequence identity is calculated by counting the number of residue matches between the target and query polynucleotide sequence and dividing total number of matches by the number of residues of the target or query sequence found in the region of strongest alignment. For the example above, the percent identity would be 10 matches divided by 11 residues, or approximately, 90.9%

[0050] The percent of the alignment region length is typically at least about 55% of total length of the sequence, more typically at least about 58%, and even more typically at least about 60% of the total residue length of the sequence. Usually, percent length of the alignment region can be as great as about 62%, more usually as great as about 64% and even more usually as great as about 66%.

[0051] Stringent conditions for both DNA/DNA and DNA/RNA hybridization are as described by Sambrook et al. Molecular Cloning, A Laboratory Manual, 2nd Ed., Cold Spring Harbor Laboratory Press, Cold Spring Harbor, N.Y., 1989, herein incorporated by reference. For example, see page 7.52 of Sambrook et al.

[0052] The term “host cell” includes an individual cell or cell culture which can be or has been a recipient of any recombinant vector(s) or isolated polynucleotide of the invention. Host cells include progeny of a single host cell, and the progeny may not necessarily be completely identical (in morphology or in total DNA complement) to the original parent cell due to natural, accidental, or deliberate mutation and/or change. A host cell includes cells transfected or infected in vivo or in vitro with a recombinant vector or a polynucleotide of the invention. A host cell which comprises a recombinant vector of the invention is a “recombinant host cell.”

[0053] The term “binds specifically,” in the context of antibody binding, refers to high avidity and/or high affinity binding of an antibody to a specific polypeptide i.e., epitope of a sulfatase polypeptide. Antibody binding to an epitope on a specific sulfatase polypeptide (also referred to herein as “a sulfatase epitope”) is preferably stronger than binding of the same antibody to any other epitope, particularly those which may be present in molecules in association with, or in the same sample, as the specific polypeptide of interest, e.g., binds more strongly to a specific sulfatase epitope than to a different sulfatase epitope so that by adjusting binding conditions the antibody binds almost exclusively to the specific sulfatase epitope and not to any other sulfatase epitope, and not to any other sulfatase polypeptide which does not comprise the epitope. Antibodies which bind specifically to a subject polypeptide may be capable of binding other polypeptides at a weak, yet detectable, level (e.g., 10% or less of the binding shown to the polypeptide of interest). Such weak binding, or background binding, is readily discernible from the specific antibody binding to a subject polypeptide, e.g. by use of appropriate controls. In general, antibodies of the invention which bind to a specific sulfatase polypeptide with a binding affinity of 10⁻⁷ M or more, preferably 10⁻⁸ M or more (e.g., 10⁻⁹ M, 10⁻¹⁰, 10⁻¹¹, etc.). In general, an antibody with a binding affinity of 10⁻⁶ M or less is not useful in that it will not bind an antigen at a detectable level using conventional methodology currently used.

[0054] A “biological sample” encompasses a variety of sample types obtained from an individual and can be used in a diagnostic or monitoring assay. The definition encompasses blood and other liquid samples of biological origin, solid tissue samples such as a biopsy specimen or tissue cultures or cells derived therefrom and the progeny thereof. The definition also includes samples that have been manipulated in any way after their procurement, such as by treatment with reagents, solubilization, or enrichment for certain components, such as polynucleotides or polypeptides. The term “biological sample” encompasses a clinical sample, and also includes cells in culture, cell supernatants, cell lysates, serum, plasma, biological fluid, and tissue samples.

[0055] The term “angiogenesis” refers to a process of tissue vascularization that involves the development of new vessels. Angiogenesis occurs via one of three mechanisms: (1) neovascularization, where endothelial cells migrate out of pre-existing vessels beginning the formation of the new vessels; (2) vasculogenesis, where the vessels arise from precursor cells de novo; or (3) vascular expansion, where existing small vessels enlarge in diameter to form larger vessels (Blood, et al. (1990) Biochem. Biophys. Acta. 1032:89-118).

[0056] The terms “cancer”, “neoplasm”, “tumor”, and “carcinoma”, are used interchangeably herein to refer to cells which exhibit relatively autonomous growth, so that they exhibit an aberrant growth phenotype characterized by a significant loss of control of cell proliferation. Cancerous cells can be benign or malignant.

[0057] As used herein, the terms “treatment”, “treating”, and the like, refer to obtaining a desired pharmacologic and/or physiologic effect. The effect may be prophylactic in terms of completely or partially preventing a disease or symptom thereof and/or may be therapeutic in terms of a partial or complete cure for a disease and/or adverse affect attributable to the disease. “Treatment”, as used herein, covers any treatment of a disease in a mammal, particularly in a human, and includes: (a) preventing the disease from occurring in a subject which may be predisposed to the disease but has not yet been diagnosed as having it; (b) inhibiting the disease, i.e., arresting its development; and (c) relieving the disease, i.e., causing regression of the disease.

[0058] The terms “individual,” “subject,” “host,” and “patient,” used interchangeably herein, refer to a mammal, including, but not limited to, murines, simians, humans, felines, canines, equines, bovines, mammalian farm animals, mammalian sport animals, and mammalian pets.

[0059] Before the present invention is further described, it is to be understood that this invention is not limited to particular embodiments described, as such may, of course, vary. It is also to be understood that the terminology used herein is for the purpose of describing particular embodiments only, and is not intended to be limiting, since the scope of the present invention will be limited only by the appended claims.

[0060] Where a range of values is provided, it is understood that each intervening value, to the tenth of the unit of the lower limit unless the context clearly dictates otherwise, between the upper and lower limit of that range and any other stated or intervening value in that stated range, is encompassed within the invention. The upper and lower limits of these smaller ranges may independently be included in the smaller ranges, and are also encompassed within the invention, subject to any specifically excluded limit in the stated range. Where the stated range includes one or both of the limits, ranges excluding either or both of those included limits are also included in the invention.

[0061] Unless defined otherwise, all technical and scientific terms used herein have the same meaning as commonly understood by one of ordinary skill in the art to which this invention belongs. Although any methods and materials similar or equivalent to those described herein can also be used in the practice or testing of the present invention, the preferred methods and materials are now described. All publications mentioned herein are incorporated herein by reference to disclose and describe the methods and/or materials in connection with which the publications are cited.

[0062] It must be noted that as used herein and in the appended claims, the singular forms “a”, “and”, and “the” include plural referents unless the context clearly dictates otherwise. Thus, for example, reference to “a sulfatase” includes a plurality of such sulfatases and reference to “the agent” includes reference to one or more agents and equivalents thereof known to those skilled in the art, and so forth.

[0063] The publications discussed herein are provided solely for their disclosure prior to the filing date of the present application. Nothing herein is to be construed as an admission that the present invention is not entitled to antedate such publication by virtue of prior invention. Further, the dates of publication provided may be different from the actual publication dates which may need to be independently confirmed.

### DETAILED DESCRIPTION OF THE INVENTION

[0064] Overview

[0065] Sulfatases are a family of enzymes that release sulfate from glycoproteins, sulfolipids, and proteoglycans. The present invention provides novel sulfatases and polypeptides related thereto, as well as nucleic acid compositions encoding the same. The subject polypeptide and/or nucleic acid compositions find use in a variety of different applications, including various diagnostic and therapeutic agent screening/discovery/preparation applications.

[0066] In many embodiments, a novel sulfatase of the invention exhibits one or more of the following properties: (1) exhibits glucosamine-6-sulfatase activity; (2) is an endosulfatase, removing sulfate from the C-6 position of internal glucosamines as well as from glucosamines at the non-reducing termini of polysaccharides (3) removes a sulfate group from glycoproteins and/or proteoglycans; (4) is secreted from a eukaryotic cell; (5) acts on extracellular matrix (ECM) components to remove a sulfate group, resulting in release from the ECM of extracellular differentiation factors and/or growth factors; (6) mRNA encoding the sulfatase shows elevated expression in tumors; (7) is secreted in greater abundance from a cancerous cell as compared to a non-cancerous cell of the same cell and/or tissue type; (8) exhibits endoglucosamine-6-sulfatase activity on heparin, e.g., removes 6-sulfate groups from heparin; and (9) is pro-angiogenic.

[0067] The subject sulfatases are expressed at elevated levels in tumors, compared with normal tissue. Without wishing to be bound by any particular theory, it is believed that a subject sulfatase is secreted from a tumor cell, and acts on component(s) of the ECM to release one or more differentiation factors or growth factors, including angiogenic factor(s). Angiogenic factors then act on local endothelial cells and promote angiogenesis, resulting in access of the tumor to the vasculature, and therefore to the blood supply. By reducing access of a tumor to the vasculature, one can reduce tumor growth.

[0068] Polypeptide Compositions

[0069] Novel sulfatases, as well as polypeptide compositions related thereto, are provided. The invention provides a sulfatase present in other than its natural environment. Novel sulfatases of the invention encompass SULF1 and SULF2. In some embodiments, a subject sulfatase is a human sulfatase. In other embodiments, a subject sulfatase is a mouse sulfatase.

[0070] In particular embodiments, a subject sulfatase has an amino acid sequence substantially identical to the sequence of any one of SEQ ID NOS:03, 06, 09, 12, 15, and 18. In other particular embodiments, a subject sulfatase has an amino acid sequence substantially identical to any one of the sequences depicted in FIG. 1B, FIG. 2B, FIG. 3B, FIG. 4B, FIG. 10B, and FIG. 11B.

[0071] In many embodiments, a novel sulfatase of the invention exhibits one or more of the following properties: (1) exhibits glucosamine-6-sulfatase activity; (2) is an endosulfatase, removing sulfate from the C-6 position of internal glucosamines as well as from glucosamines at the non-reducing termini of polysaccharides (3) removes a sulfate group from glycoproteins and/or proteoglycans; (4) is secreted from a eukaryotic cell; (5) acts on extracellular matrix (ECM) components to remove a sulfate group, resulting in release from the ECM of extracellular differentiation factors and/or growth factors; (6) mRNA encoding the sulfatase shows elevated expression in tumors; (7) is secreted in greater abundance from a cancerous cell as compared to a non-cancerous cell of the same cell and/or tissue type; (8) exhibits endoglucosamine-6-sulfatase activity on heparin, e.g., removes 6-sulfate groups from heparin; and (9) is pro-angiogenic.

[0072] The invention also provides fragments of the subject sulfatases. In some embodiments, fragments exhibit sulfatase activity. Fragments find utility in generating antibodies to the full-length sulfatases; and in methods of screening for candidate agents that bind to and/or modulate sulfatase enzymatic activity. The term “sulfatase polypeptide composition” as used herein refers to both the full-length human protein as well as portions or fragments thereof. Also included in this term are variations of the naturally occurring human protein, where such variations are homologous or substantially similar to the naturally occurring protein, as described in greater detail below, as well as corresponding homologs from non-human species, such as other mammalian species. In the following description of the subject invention, the terms “SULF1” and “SULF2” are used to refer not only to the human form of these novel sulfatases, but also to homologs thereof expressed in non-human species.

[0073] Human SULF1(huSULF1) is an 871 amino acid protein having an amino acid sequence as shown in FIG. 1B and identified as SEQ ID NO:03. HuSULF1 has a molecular weight based on its amino acid of about 80 to about 100 kDa.

[0074] Human SULF2 (huSULF2) is an 870 amino acid protein having an amino acid sequence as shown in FIG. 2B and identified as SEQ ID NO:06. HuSULF2 has a molecular weight based on its amino acid of about 80 to about 100 kDa. In some embodiments, a subject sulfatase has an amino acid sequence as shown in FIG. 10B and as set forth in SEQ ID NO:15.

[0075] Mouse SULF1 (mSULF1) is an 870 amino acid protein having an amino acid sequence as shown in FIG. 3B and as set forth in SEQ ID NO:09.

[0076] Mouse SULF2 (mSULF2) is an 875 amino acid protein having an amino acid sequence as shown in FIG. 4B and as set forth in SEQ ID NO:12. In some embodiments, a subject sulfatase has an amino acid sequence as shown in FIG. 11B and as set forth in SEQ ID NO:18.

[0077] The subject sulfatases have a molecular weight of between 80 and 100 kDa based on their amino acid sequences. Subject sulfatases produced by a eukaryotic cell are glycosylated, and in some embodiments have a molecular weight of about 126 kDa. In addition, in some embodiments, a subject sulfatase is proteolytically cleaved to produce fragments of from about 60 kDa to about 70 kDa (e.g., 61 kDa, 66 kDa, 71 kDa); from about 48 kDa to about 55 kDa (e.g., 49 kDa, 53 kDa); or from about 40 to about 55 kDa (e.g., 40 kDa, 49 kDa, 53 kDa). Many of these fragments or associations of these fragments have sulfatase activity.

[0078] In addition to the above specifically listed proteins, sulfatases from other species are also provided, including mammals, such as: rodents, e.g. mice, rats; domestic animals, e.g. horse, cow, dog, cat; and humans, as well as non-mammalian species, e.g. avian, and the like. By homolog is meant a protein having at least about 35%, at least about 40%, at least about 60%, at least about 70%, at least about 75%, at least about 80%, at least about 90%, or at least about 95%, or higher, amino acid sequence identity to the one of the above specifically listed sulfatases, as measured by using the “GAP” program (part of the Wisconsin Sequence Analysis Package available through the Genetics Computer Group, Inc. (Madison Wis.)), where the parameters are: Gap weight:12; length weight:4. In many embodiments of interest, homology will be at least 75, usually at least 80 and more usually at least 85%, where in certain embodiments of interest homology will be as high as 90%.

[0079] Also provided are sulfatase proteins that are substantially identical to the above listed proteins, where by substantially identical is meant that the protein has an amino acid sequence identity to the sequence one of the above listed proteins of at least about 75%, at least about 80% at least about 85%, at least about 90%, at least about 95%, or at least about 98%.

[0080] The proteins of the subject invention (e.g. SULF1, SULF2, huSULF1, huSULF2, mSULF1, mSULF2, and the like) are present in a non-naturally occurring environment, e.g. are separated from their naturally occurring environment. In certain embodiments, the subject proteins are present in a composition that is enriched for subject protein as compared to its naturally occurring environment. For example, purified sulfatases are provided, where by purified is meant that the sulfatase is present in a composition that is substantially free of non-sulfatase proteins, where by substantially free is meant that less than 90%, usually less than 60% and more usually less than 50% of the composition is made up of non-sulfatase proteins.

[0081] The proteins of the subject invention may also be present as an isolate, by which is meant that the protein is substantially free of other proteins and other naturally occurring biologic molecules, such as oligosaccharides, polynucleotides and fragments thereof, and the like, where substantially free in this instance means that less than 70%, usually less than 60% and more usually less than 50% of the composition containing the isolated protein is some other naturally occurring biological molecule. In certain embodiments, the proteins are present in substantially pure form, where by substantially pure form is meant at least 95%, usually at least 97% and more usually at least 99% pure.

[0082] In addition to the naturally occurring proteins, polypeptides which vary from the naturally occurring proteins (e.g., huSULF1, huSULF2, mSULF1, mSULF2, etc.) are also provided. By SULF1 and SULF2 polypeptide is meant an amino acid sequence encoded by an open reading frame (ORF) of the SULF1 and SULF2 gene, described in greater detail below, including the full length SULF1 and SULF2 protein and fragments thereof, particularly biologically active fragments and/or fragments corresponding to functional domains, e.g., sulfatase active site; and including fusions of the subject polypeptides to other proteins or parts thereof. Fusion proteins may comprise a subject polypeptide, or fragment thereof, and a non-SULF polypeptide (“the fusion partner”) fused in-frame at the N-terminus and/or C-terminus of the subject SULF polypeptide.

[0083] Fusion partners include, but are not limited to, polypeptides that can bind antibody specific to the fusion partner (e.g., epitope tags, e.g., hemagglutinin (HA; e.g., CYPYDVPDYA; SEQ ID NO:19), FLAG (e.g., DYKDDDDK; SEQ ID NO:20), c-myc (e.g., CEQKLISEEDL; SEQ ID NO:21), and the like); polypeptides that provide a detectable signal (e.g., a fluorescent protein, e.g., a green fluorescent protein, a fluorescent protein from an Anthozoan species; β-galactosidase; luciferase; and the like); polypeptides that provide a catalytic function or induce a cellular response; polypeptides that provide for secretion of the fusion protein from a eukaryotic cell; polypeptides that provide for secretion of the fusion protein from a prokaryotic cell; polypeptides that provide for binding to metal ions (e.g., histidine polymers, e.g., Hisₙ, where n=10, e.g., 6His); and the like.

[0084] In some embodiments, a SULF polypeptide of the invention comprises at least about 10, at least about 20, at least about 25, at least about 50, at least about 75, at least about 100, at least about 150, at least about 200, at least about 250, at least about 300, at least about 350, at least about 400, at least about 450, at least about 500, at least about 550, at least about 600, at least about 650, at least about 700, at least about 750, at least about 800, or at least about 850 contiguous amino acids of one of the sequences as set forth in any one of SEQ ID NOS:3, 6, 9, 12, 15, and 18, and in FIGS. 1B, 2B, 3B, 4B, 10B, and 11B, up to the entire amino acid sequence as set forth in any one of SEQ ID NOS:3, 6, 9, 12, 15, and 18, and in FIGS. 1B, 2B, 3B, 4B, 10B, and 11B.

[0085] Fragments of the subject polypeptides, as well as polypeptides comprising such fragments, are also provided. Fragments of SULF1 and SULF2 of interest will typically be at least about 10 amino acids (aa) in length, usually at least about 50 aa in length, and may be as long as 300 aa in length or longer, where the fragment will have a stretch of amino acids that is identical to the subject protein of at least about 10 aa, and usually at least about 15 aa, and in many embodiments at least about 50 aa in length.

[0086] Specific fragments of interest include a sulfatase domain. The first sulfatase domain encompasses from about amino acid 42 to about amino acid 389 or from about amino acid 42 to about amino acid 415 of a subject sulfatase. The sulfatase domain cleaves the sulfate moiety from N-acetylglucosamine-6-sulfate or glucosamine-6-sulfate structures within heparan sulfate glycosamino glycans and related glycoconjugates.

[0087] Accordingly, in some embodiments, a subject sulfatase fragment is from about amino acid 40 to about amino acid 390, or from about amino acid 40 to about amino acid 415, of any one of SEQ ID NOs:03, 06, 09, 12, 15, or 18, or variants thereof, especially variants containing conserved amino acid substitutions. The invention provides polypeptides comprising such fragments, including, e.g., fusion polypeptides comprising a subject sulfatase fragment fused in frame (directly or indirectly) to a heterologous protein. Suitable heterologous proteins include, but are not limited to, a protein that serves as a detectable marker (e.g., a fluorescent protein, β-galactosidase, luciferase); an immunologically detectable protein (e.g., an epitope tag); and a structural protein.

[0088] Within the first sulfatase domains are cleavage sites for the furin/PACE protease processing enzymes. This cleavage occurs between residues 408 (arginine) and 409 (aspartic acid) and/or between 576 (arginine) and 577 (histidine), and/or between 661 (arginine) and 662 (glutamic acid), and/or between 669 (arginine) and 670 (arginine), and/or between 732 (arginine) and 733 (glutamine) of hsulf-1. The cleavage occurs between 409 (arginine) and 410 (aspartic acid) and/or between 423 (arginine) and 424 (aspartic acid) and/or between 538 (arginine) and 539 (serine) and/or between 565 (arginine) and 566 (histidine), and/or between 646 (arginine) and 647 (glutamic), and/or between 656 (arginine) and 657 (proline) and/or between 848 (arginine) and 849 (lysine) of hsulf-2. Cleavage is necessary for activity of the enzyme. Accordingly, in many embodiments, a subject sulfatase is cleaved at one or more furin/PACE cleavage sites. Thus, in many embodiments, a subject sulfatase includes amino acids from about 1 to about amino acid 408 or 409 (e.g., up to the first furin/PACE cleavage site).

[0089] Sulfatase fragments, and polypeptides comprising sulfatase fragments, such as the sulfatase fragments described above, are useful in screening assays, to identify agents that modulate an activity, e.g., an enzymatic activity, of a subject sulfatase. Screening assays are described in more detail below. For example, a polypeptide comprising a first sulfatase domain is used in a screening assay to identify agents that modulate cleavage of the sulfate moiety from the N-acetylglusamine-6-sulfate or glucosamine-6-sulfate structures within heparan sulfate glycosamino glycans and related glycoconjugates.

[0090] A subject polypeptide may further include a glucosamine-6-sulfate (G6S-related) domain of a subject sulfatase. A G6S-related domain is involved in substrate recognition. Thus, a G6S-related domain binds to a glucosamine/GlcNAc component of a substrate of a subject sulfatase. The G6S-related domain is a region of approximately 108 amino acids near the carboxyl terminus of the sulfatase. A G6S -related domain is from about 90 to about 120, from about 95 to about 115, or from about 100 to about 110 amino acids in length. For example, the G6S-related domain is from about amino acid 700 to about amino acid 870, from about 710 to about amino acid 850 of a subject sulfatase. Exemplary G6S-related domains are amino acids 736-843 of human sulfatase-1; amino acids 735 to 842 of mouse sulfatase-1, amino acids 717 to 824 of human sulfatase-2; and amino acids 722 to 829 of mouse sulfatase-2. The invention provides polypeptides comprising such G6S-related fragments, including, e.g., fusion polypeptides comprising a subject sulfatase fragment fused in frame (directly or indirectly) to a heterologous protein. Suitable heterologous proteins include, but are not limited to, a protein that serves as a detectable marker (e.g., a fluorescent protein, β-galactosidase, luciferase); an immunologically detectable protein (e.g., an epitope tag); and a structural protein.

[0091] A G6S-related fragment of a subject sulfatase, or a polypeptide comprising a G6S-related domain of a subject sulfatase, is useful for identifying agents that target the G6S-related domain. Agents thus identified are useful in reducing the activity of a subject sulfatase, because a reduction in substrate recognition results in reduction in the rate and/or degree of sulfate moiety removal from the substrate by the catalytic (sulfatase) domain of a subject sulfatase.

[0092] The invention further provides a coiled-coil domain fragment of a subject sulfatase, and polypeptides comprising such fragments. A coiled-coil domain serves as a multimerization element. A coiled-coil domain of a subject sulfatase is from about 30 to about 40 amino acids in length, e.g., about 34-35 amino acids in length. A coiled-coil domain is found in a region of from about amino acid 600 to about amino acid 700, from about amino acid 620 to about amino acid 680, from about amino acid 630 to about amino acid 670, or from about amino acid 640 to about amino acid 660 of a subject sulfatase. The invention provides polypeptides comprising such coiled-coil fragments, including, e.g., fusion polypeptides comprising a subject sulfatase fragment fused in frame (directly or indirectly) to a heterologous protein. Suitable heterologous proteins include, but are not limited to, a protein that serves as a detectable marker (e.g., a fluorescent protein, β-galactosidase, luciferase); an immunologically detectable protein (e.g., an epitope tag); and a structural protein.

[0093] A coiled-coil fragment, or a polypeptide comprising a coiled-coil domain of a subject sulfatase is useful in screening assays to identify compounds that disrupt or reduce a biological activity of a subject sulfatase. A compound thus identified is useful for reducing a biological activity of a subject sulfatase.

[0094] The subject proteins and polypeptides may be obtained from naturally occurring sources or synthetically produced. Where obtained from naturally occurring sources, the source chosen will generally depend on the species from which the protein is to be derived. The subject proteins may also be derived from synthetic means, e.g. by expressing a recombinant gene encoding protein of interest in a suitable host, as described in greater detail below. Any convenient protein purification procedures may be employed, where suitable protein purification methodologies are described in Guide to Protein Purification, (Deuthser ed.) (Academic Press, 1990). For example, a lysate may be prepared from the original source and purified using HPLC, exclusion chromatography, gel electrophoresis, affinity chromatography, and the like.

[0095] Nucleic Acid Compositions

[0096] Also provided are nucleic acid compositions encoding the subject novel sulfatases or fragments thereof. By nucleic acid composition is meant a composition comprising a sequence of DNA having an open reading frame that encodes one the subject sulfatases and is capable, under appropriate conditions, of being expressed as one of the subject sulfatases described above. Thus, the term encompasses genomic DNA, cDNA, mRNA, and vectors comprising the subject nucleic acid sequences. Also encompassed in this term are nucleic acids that are homologous or substantially similar or identical to the nucleic acids encoding the subject sulfatase proteins. Thus, the subject invention provides genes encoding huSULF1, huSULF2, mSULF1, mSULF2, and homologs thereof.

[0097] The human SULF1 cDNA has the nucleic acid sequence shown in FIGS. 1Ai-1Aii, and identified as SEQ ID NO:01. The coding region is depicted by nucleotides shown in upper case letters in FIGS. 1Ai-1Aii. The coding region is set forth in SEQ ID NO:02.

[0098] The human SULF2 cDNA has the nucleic acid sequence shown in FIGS. 2Ai-2Aii, and identified as SEQ ID NO:04. The coding region is depicted by nucleotides shown in upper case letters in FIGS. 2Ai-2Aii. The coding region is set forth in SEQ ID NO:05.

[0099] In some embodiments, a human SULF2 cDNA has the nucleic acid sequence shown in FIGS. 11Ai-11Aii and set forth in SEQ ID NO:13, with the open reading frame (coding region) set forth in SEQ ID NO:14.

[0100] The mouse SULF1 cDNA has the nucleic acid sequence shown in FIGS. 3Ai-3Aii, and identified as SEQ ID NO:07. The coding region is depicted by nucleotides shown in upper case letters in FIGS. 3Ai-3Aii. The coding region is set forth in SEQ ID NO:08.

[0101] The mouse SULF2 cDNA has the nucleic acid sequence shown in FIGS. 4Ai-4Aii, and identified as SEQ ID NO:10. The coding region is depicted by nucleotides shown in upper case letters in FIGS. 4Ai-4Aii. The coding region is set forth in SEQ ID NO:11. In some embodiments, a mouse SULF2 cDNA has the nucleic acid sequence shown in FIGS. 12Ai-12Aii, and set forth in SEQ ID NO:16, with the open reading frame set forth in SEQ ID NO:17.

[0102] In some embodiments, a SULF polynucleotide of the invention comprises a nucleotide sequence of at least about 30, at least about 50, at least about 75, at least about 100, at least about 150, at least about 200, at least about 300, at least about 400, at least about 500, at least about 600, at least about 700, at least about 800, at least about 900, at least about 1000, at least about 1100, at least about 1200, at least about 1300, at least about 1400, at least about 1500, at least about 1600, at least about 1700, at least about 1800, at least about 1900, at least about 2000, at least about 2100, at least about 2200, at least about 2300, at least about 2400, at least about 2500, or at least about 2600 contiguous nucleotides of the sequence set forth in one of SEQ ID NOS:1, 4, 7, 10, 13, or 16; or as set forth in any one of SEQ ID NOS:2, 5, 8, 11, 14, or 17; or in one of FIGS. 1Ai-1Aii, 2Ai-2Aii, 3Ai-3Aii, 4Ai-4Aii, 11Ai-11Aii, or 12Ai-12Aii.

[0103] In some embodiments, a SULF polynucleotide of the invention specifically excludes the sequences set forth in one or more of SEQ ID NO:01, 02, 04, 05, 13, and 14.

[0104] In other embodiments, a SULF polynucleotide of the invention comprises a nucleotide sequence that encodes a polypeptide comprising an amino acid sequence of at least about 10, at least about 20, at least about 25, at least about 50, at least about 75, at least about 100, at least about 150, at least about 200, at least about 250, at least about 300, at least about 350, at least about 400, at least about 450, at least about 500, at least about 550, at least about 600, at least about 650, at least about 700, at least about 750, at least about 800, or at least about 850 contiguous amino acids of one of the sequences as set forth in any one of SEQ ID NOS:3, 6, 9, 12, 15, or 18, or as depicted in one or FIGS. 1B, 2B, 3B, 4B, 10B, and 11B, up to the entire amino acid sequence as set forth in one of SEQ ID NOS:3, 6, 9, 12, 15, or 18, or as depicted in one or FIGS. 1B, 2B 3B, 4B, 10B, and 11B.

[0105] The source of homologous genes may be any species, e.g., primate species, particularly human; rodents, such as rats and mice, canines, felines, bovines, ovines, equines, yeast, nematodes, etc. Between mammalian species, e.g., human and mouse, homologs have substantial sequence similarity, e.g. at least 60% sequence identity, usually at least 75%, more usually at least 80% between nucleotide sequences. In many embodiments of interest, homology will be at least 75, usually at least 80 and more usually at least 85%, where in certain embodiments of interest homology will be as high as 90%. Sequence similarity is calculated based on a reference sequence, which may be a subset of a larger sequence, such as a conserved motif, coding region, flanking region, etc. A reference sequence will usually be at least about 18 nt long, more usually at least about 30 nt long, and may extend to the complete sequence that is being compared. Algorithms for sequence analysis are known in the art, such as BLAST, described in Altschul et al. (1990), J. Mol. Biol. 215:403-10 (using default settings). The sequences provided herein are essential for recognizing related and homologous proteins in database searches.

[0106] Nucleic acids encoding the proteins and polypeptides of the subject invention may be cDNA or genomic DNA or a fragment thereof. The term gene shall be intended to mean the open reading frame encoding specific proteins and polypeptides of the subject invention, and introns, as well as adjacent 5′ and 3′ non-coding nucleotide sequences involved in the regulation of expression, up to about 20 kb beyond the coding region, but possibly further in either direction. The gene may be introduced into an appropriate vector for extrachromosomal maintenance or for integration into a host genome.

[0107] The term “cDNA” as used herein is intended to include all nucleic acids that share the arrangement of sequence elements found in native mature mRNA species, where sequence elements are exons and 3′ and 5′ non-coding regions. Normally mRNA species have contiguous exons, with the intervening introns, when present, being removed by nuclear RNA splicing, to create a continuous open reading frame encoding a protein according to the subject invention.

[0108] A genomic sequence of interest comprises the nucleic acid present between the initiation codon and the stop codon, as defined in the listed sequences, including all of the introns that are normally present in a native chromosome. It may further include the 3′ and 5′ untranslated regions found in the mature mRNA. It may further include specific transcriptional and translational regulatory sequences, such as promoters, enhancers, etc., including about 1 kb, but possibly more, of flanking genomic DNA at either the 5′ or 3′ end of the transcribed region. The genomic DNA may be isolated as a fragment of 100 kbp or smaller; and substantially free of flanking chromosomal sequence. The genomic DNA flanking the coding region, either 3′ or 5′, or internal regulatory sequences as sometimes found in introns, contains sequences required for proper tissue and stage specific expression.

[0109] The genomic sequence of human SULF2 is set forth in SEQ ID NO:22. The genomic sequence of human SULF1 is set forth in SEQ ID NO:23. The genomic sequence of mouse SULF2 is set forth in SEQ ID NO:24. In particular embodiments, a subject genomic sequence has the sequence as set forth in any one of SEQ ID NO:22, 23, or 24.

[0110] The nucleic acid compositions of the subject invention may encode all or a part of the subject proteins. Double or single stranded fragments may be obtained from the DNA sequence by chemically synthesizing oligonucleotides in accordance with conventional methods, by restriction enzyme digestion, by PCR amplification, etc. For the most part, DNA fragments will be of at least 15 nt, usually at least 18 nt or 25 nt, and may be at least about 50 nt.

[0111] A subject nucleic acid may comprise a nucleotide sequence encoding one or more of the following fragments of a subject sulfatase: a sulfatase domain; a G6S domain; and a coiled-coil domain. A subject nucleic acid may encode a fusion protein comprising one or more of the foregoing domains fused in-frame to a heterologous protein, as described above.

[0112] SULF nucleic acid molecules of the invention may comprise other, non-SULF nucleic acid molecules (“heterologous nucleic acid molecules”) of any length. For example, the subject nucleic acid molecules may be flanked on the 5′ and/or 3′ ends by heterologous nucleic acid molecules of from about 1 nt to about 10 nt, from about 10 nt to about 20 nt, from about 20 nt to about 50 nt, from about 50 nt to about 100 nt, from about 100 nt to about 250 nt, from about 250 nt to about 500 nt, or from about 500 nt to about 1000 nt, or more in length. For example, when used as a probe to detect nucleic acid molecules capable of hybridizing with the subject nucleic acids, the subject nucleic acid molecules may be flanked by heterologous sequences of any length.

[0113] The subject nucleic acid molecules may also be provided as part of a vector (e.g., a SULF construct), a wide variety of which are known in the art and need not be elaborated upon herein. Vectors include, but are not limited to, plasmids; cosmids; viral vectors; artificial chromosomes (YAC's, BAC's, etc.); mini-chromosomes; and the like. Vectors are amply described in numerous publications well known to those in the art, including, e.g., Short Protocols in Molecular Biology, (1999) F. Ausubel, et al., eds., Wiley & Sons. Vectors may provide for expression of the subject nucleic acids, may provide for propagating the subject nucleic acids, or both.

[0114] The subject genes are isolated and obtained in substantial purity, generally as other than an intact chromosome. Usually, the DNA will be obtained substantially free of other nucleic acid sequences that do not include a sequence or fragment thereof of the subject genes, generally being at least about 50%, usually at least about 90% pure and are typically “recombinant”, i.e. flanked by one or more nucleotides with which it is not normally associated on a naturally occurring chromosome.

[0115] Preparation of the Subject Polypeptides

[0116] In addition to the plurality of uses described in greater detail in following sections, the subject nucleic acid compositions find use in the preparation of all or a portion of the sulfatase polypeptides of the subject invention, as described above. For expression, an expression cassette may be employed. The expression vector will provide a transcriptional and translational initiation region, which may be inducible or constitutive, where the coding region is operably linked under the transcriptional control of the transcriptional initiation region, and a transcriptional and translational termination region. These control regions may be native to a gene encoding the subject peptides, or may be derived from exogenous sources.

[0117] Expression vectors generally have convenient restriction sites located near the promoter sequence to provide for the insertion of nucleic acid sequences encoding heterologous proteins. A selectable marker operative in the expression host may be present. Expression vectors may be used for the production of fusion proteins, where the exogenous fusion peptide provides additional functionality, i.e. increased protein synthesis, stability, reactivity with defined antisera, an enzyme marker, e.g. β-galactosidase, etc.

[0118] Expression cassettes may be prepared comprising a transcription initiation region, the gene or fragment thereof, and a transcriptional termination region. Of particular interest is the use of sequences that allow for the expression of functional epitopes or domains, usually at least about 8 amino acids in length, more usually at least about 15 amino acids in length, to about 25 amino acids, or any of the above-described fragment, and up to the complete open reading frame of the gene. After introduction of the DNA, the cells containing the construct may be selected by means of a selectable marker, the cells expanded and then used for expression.

[0119] Proteins and polypeptides may be expressed in prokaryotes or eukaryotes in accordance with conventional ways, depending upon the purpose for expression. For large scale production of the protein, a unicellular organism, such as E. coli, B. subtilis, S. cerevisiae, insect cells in combination with baculovirus vectors, or cells of a higher organism such as vertebrates, particularly mammals, e.g. COS 7 cells, may be used as the expression host cells. In some situations, it is desirable to express the gene in eukaryotic cells, where the encoded protein will benefit from native folding and post-translational modifications. Small peptides can also be synthesized in the laboratory. Polypeptides that are subsets of the complete sequences of the subject proteins may be used to identify and investigate parts of the protein important for function.

[0120] Specific expression systems of interest include bacterial, yeast, insect cell and mammalian cell derived expression systems. Representative systems from each of these categories is are provided below:

[0121] Bacteria. Expression systems in bacteria include those described in Chang et al., Nature (1978) 275:615; Goeddel et al., Nature (1979) 281:544; Goeddel et al., Nucleic Acids Res. (1980) 8:4057; EP 0 036,776; U.S. Pat. No. 4,551,433; DeBoer et al., Proc. Natl. Acad. Sci. (USA) (1983) 80:21-25; and Siebenlist et al., Cell (1980) 20:269.

[0122] Yeast. Expression systems in yeast include those described in Hinnen et al., Proc. Natl. Acad. Sci. (USA) (1978) 75:1929; Ito et al., J. Bacteriol. (1983) 153:163; Kurtz et al., Mol. Cell. Biol. (1986) 6:142; Kunze et al., J. Basic Microbiol. (1985) 25:141; Gleeson et al., J. Gen. Microbiol. (1986) 132:3459; Roggenkamp et al., Mol. Gen. Genet. (1986) 202:302; Das et al., J. Bacteriol. (1984) 158:1165; De Louvencourt et al., J. Bacteriol. (1983) 154:737; Van den Berg et al., Bio/Technology (1990) 8:135; Kunze et al., J. Basic Microbiol. (1985) 25:141; Cregg et al., Mol. Cell. Biol. (1985) 5:3376; U.S. Pat. Nos. 4,837,148 and 4,929,555; Beach and Nurse, Nature (1981) 300:706; Davidow et al., Curr. Genet. (1985) 10:380; Gaillardin et al., Curr. Genet. (1985) 10:49; Ballance et al., Biochem. Biophys. Res. Commun. (1983) 112:284-289; Tilburn et al., Gene (1983) 26:205-221; Yelton et al., Proc. Natl. Acad. Sci. (USA) (1984) 81:1470-1474; Kelly and Hynes, EMBO J. (1985) 4:475479; EP 0 244,234; and WO 91/00357.

[0123] Insect Cells. Expression of heterologous genes in insects is accomplished as described in U.S. Pat. No. 4,745,051; Friesen et al., “The Regulation of Baculovirus Gene Expression”, in: The Molecular Biology Of Baculoviruses (1986) (W. Doerfler, ed.); EP 0 127,839; EP 0 155,476; and Vlak et al., J. Gen. Virol. (1988) 69:765-776; Miller et al., Ann. Rev. Microbiol. (1988) 42:177; Carbonell et al., Gene (1988) 73:409; Maeda et al., Nature (1985) 315:592-594; Lebacq-Verheyden et al., Mol. Cell. Biol. (1988) 8:3129; Smith et al., Proc. Natl. Acad. Sci. (USA) (1985) 82:8844; Miyajima et al., Gene (1987) 58:273; and Martin et al., DNA (1988) 7:99. Numerous baculoviral strains and variants and corresponding permissive insect host cells from hosts are described in Luckow et al., Bio/Technology (1988) 6:47-55, Miller et al., Generic Engineering (1986) 8:277-279, and Maeda et al., Nature (1985) 315:592-594.

[0124] Mammalian Cells. Mammalian expression is accomplished as described in Dijkema et al., EMBO J. (1985) 4:761, Gorman et al., Proc. Natl. Acad. Sci. (USA) (1982) 79:6777, Boshart et al., Cell (1985) 41:521 and U.S. Pat. No. 4,399,216. Other features of mammalian expression are facilitated as described in Ham and Wallace, Meth. Enz. (1979) 58:44, Barnes and Sato, Anal. Biochem. (1980) 102:255, U.S. Pat. Nos. 4,767,704, 4,657,866, 4,927,762, 4,560,655, WO 90/103430, WO 87/00195, and U.S. Pat. No. RE 30,985.

[0125] When any of the above host cells, or other appropriate host cells or organisms, are used to replicate and/or express the polynucleotides or nucleic acids of the invention, the resulting replicated nucleic acid, RNA, expressed protein or polypeptide, is within the scope of the invention as a product of the host cell or organism. The product is recovered by any appropriate means known in the art.

[0126] Once the gene corresponding to a selected polynucleotide is identified, its expression can be regulated in the cell to which the gene is native. For example, an endogenous gene of a cell can be regulated by an exogenous regulatory sequence inserted into the genome of the cell at location sufficient to at least enhance expressed of the gene in the cell. The regulatory sequence may be designed to integrate into the genome via homologous recombination, as disclosed in U.S. Pat. Nos. 5,641,670 and 5,733,761, the disclosures of which are herein incorporated by reference, or may be designed to integrate into the genome via non-homologous recombination, as described in WO 99/15650, the disclosure of which is herein incorporated by reference. As such, also encompassed in the subject invention is the production of the subject proteins without manipulation of the encoding nucleic acid itself, but instead through integration of a regulatory sequence into the genome of cell that already includes a gene encoding the desired protein, as described in the above incorporated patent documents.

[0127] The subject proteins and polypeptides may be obtained from naturally occurring sources or synthetically produced. For example, the proteins may be derived from biological sources which express the proteins. The subject proteins may also be derived from synthetic means, e.g. by expressing a recombinant gene encoding protein of interest in a suitable host, as described in greater detail infra. Any convenient protein purification procedures may be employed, where suitable protein purification methodologies are described in Guide to Protein Purification, (Deuthser ed.) (Academic Press, 1990). For example, a lysate may prepared from the original source, (e.g. a cell expressing endogenous SULF1 or SULF2, or a cell comprising the expression vector expressing the subject polypeptide(s)), and purified using HPLC, exclusion chromatography, gel electrophoresis, affinity chromatography, and the like.

[0128] Compositions

[0129] The present invention further provides compositions, including pharmaceutical compositions, comprising the polypeptides, polynucleotides, antibodies, recombinant vectors, and host cells of the invention. These compositions may include a buffer, which is selected according to the desired use of the polypeptide, antibody, polynucleotide, recombinant vector, or host cell, and may also include other substances appropriate to the intended use. Those skilled in the art can readily select an appropriate buffer, a wide variety of which are known in the art, suitable for an intended use. In some instances, the composition can comprise a pharmaceutically acceptable excipient, a variety of which are known in the art and need not be discussed in detail herein. Pharmaceutically acceptable excipients have been amply described in a variety of publications, including, for example, A. Gennaro (1995) “Remington: The Science and Practice of Pharmacy”, 19th edition, Lippincott, Williams, & Wilkins.

[0130] Antibodies Specific for a Sulfatage of the Invention

[0131] The invention provides antibodies that are specific for a subject sulfatase. Suitable antibodies are obtained by immunizing a host animal with peptides comprising all or a portion of the target protein. Suitable host animals include mouse, rat sheep, goat, hamster, rabbit, etc. The origin of the protein immunogen may be mouse, human, rat, monkey etc. The host animal will generally be a different species than the immunogen, e.g. human protein used to immunize mice, etc.

[0132] The immunogen may comprise the complete protein, or fragments and derivatives thereof. Preferred immunogens comprise all or a part of one of the subject proteins, where these residues contain the post-translation modifications, such as glycosylation, found on the native target protein. Immunogens comprising the extracellular domain are produced in a variety of ways known in the art, e.g. expression of cloned genes using conventional recombinant methods, isolation from tumor cell culture supernatants, etc.

[0133] The invention provides antibodies that are specific for a fragment of a subject sulfatase, or an epitope of a fragment. Fragments include, but are not limited to, a sulfatase domain; a G6S-related domain; and a coiled-coil domain, as described elsewhere herein. To generate antibodies specific for a particular domain, either the whole sulfatase polypeptide, or a portion thereof, can be used. For example, a fragment that corresponds to a sulfatase domain, a G6S-related domain, or a coiled-coil domain, is coupled to a carrier molecule (e.g., keyhole limpet hemocyanin, or other carrier), and introduced into a mammalian host.

[0134] For preparation of polyclonal antibodies, the first step is immunization of the host animal with the target protein, where the target protein will preferably be in substantially pure form, comprising less than about 1% contaminant. The immunogen may comprise the complete target protein, fragments or derivatives thereof. To increase the immune response of the host animal, the target protein may be combined with an adjuvant, where suitable adjuvants include alum, dextran, sulfate, large polymeric anions, oil & water emulsions, e.g. Freund's adjuvant, Freund's complete adjuvant, and the like. The target protein may also be conjugated to synthetic carrier proteins or synthetic antigens. A variety of hosts may be immunized to produce the polyclonal antibodies. Such hosts include rabbits, guinea pigs, rodents, e.g. mice, rats, sheep, goats, and the like. The target protein is administered to the host, usually intradermally, with an initial dosage followed by one or more, usually at least two, additional booster dosages. Following immunization, the blood from the host will be collected, followed by separation of the serum from the blood cells. The Ig present in the resultant antiserum may be further fractionated using known methods, such as ammonium salt fractionation, DEAE chromatography, and the like.

[0135] Monoclonal antibodies are produced by conventional techniques. Generally, the spleen and/or lymph nodes of an immunized host animal provide a source of plasma cells. The plasma cells are immortalized by fusion with myeloma cells to produce hybridoma cells. Culture supernatant from individual hybridomas is screened using standard techniques to identify those producing antibodies with the desired specificity. Suitable animals for production of monoclonal antibodies to the human protein include mouse, rat, hamster, etc. To raise antibodies against the mouse protein, the animal will generally be a hamster, guinea pig, rabbit, etc. The antibody may be purified from the hybridoma cell supernatants or ascites fluid by conventional techniques, e.g. affinity chromatography using protein according to the subject invention bound to an insoluble support, protein A sepharose, etc.

[0136] The antibody may be produced as a single chain, instead of the normal multimeric structure. Single chain antibodies are described in Jost et al. (1994) J.B.C. 269:26267-73, and others. DNA sequences encoding the variable region of the heavy chain and the variable region of the light chain are ligated to a spacer encoding at least about 4 amino acids of small neutral amino acids, including glycine and/or serine. The protein encoded by this fusion allows assembly of a functional variable region that retains the specificity and affinity of the original antibody.

[0137] For in vivo use, particularly for injection into humans, it is desirable to decrease the antigenicity of the antibody. An immune response of a recipient against the blocking agent will potentially decrease the period of time that the therapy is effective. Methods of humanizing antibodies are known in the art. The humanized antibody may be the product of an animal having transgenic human immunoglobulin constant region genes (see for example International Patent Applications WO 90/10077 and WO 90/04036). Alternatively, the antibody of interest may be engineered by recombinant DNA techniques to substitute the CH1, CH2, CH3, hinge domains, and/or the framework domain with the corresponding human sequence (see WO 92/02190).

[0138] The use of Ig cDNA for construction of chimeric immunoglobulin genes is known in the art (Liu et al. (1987) P.N.A.S. 84:3439 and (1987) J. Immunol. 139:3521). mRNA is isolated from a hybridoma or other cell producing the antibody and used to produce cDNA. The cDNA of interest may be amplified by the polymerase chain reaction using specific primers (U.S. Pat. Nos. 4,683,195 and 4,683,202). Alternatively, a library is made and screened to isolate the sequence of interest. The DNA sequence encoding the variable region of the antibody is then fused to human constant region sequences. The sequences of human constant regions genes may be found in Kabat et al. (1991) Sequences of Proteins of Immunological Interest, N.I.H. publication no. 91-3242. Human C region genes are readily available from known clones. The choice of isotype will be guided by the desired effector functions, such as complement fixation, or activity in antibody-dependent cellular cytotoxicity. Preferred isotypes are IgG1, IgG3 and IgG4. Either of the human light chain constant regions, kappa or lambda, may be used. The chimeric, humanized antibody is then expressed by conventional methods.

[0139] In yet other embodiments, the antibodies may be fully human antibodies. For example, xenogeneic antibodies which are identical to human antibodies may be employed. By xenogenic human antibodies is meant antibodies that are the same has human antibodies, i.e. they are fully human antibodies, with exception that they are produced using a non-human host which has been genetically engineered to express human antibodies. See e.g. WO 98/50433; WO 98,24893 and WO 99/53049, the disclosures of which are herein incorporated by reference.

[0140] Antibody fragments, such as Fv, F(ab′)₂ and Fab may be prepared by cleavage of the intact protein, e.g. by protease or chemical cleavage. Alternatively, a truncated gene is designed. For example, a chimeric gene encoding a portion of the F(ab′)₂ fragment would include DNA sequences encoding the CH1 domain and hinge region of the H chain, followed by a translational stop codon to yield the truncated molecule.

[0141] Consensus sequences of H and L J regions may be used to design oligonucleotides for use as primers to introduce useful restriction sites into the J region for subsequent linkage of V region segments to human C region segments. C region cDNA can be modified by site directed mutagenesis to place a restriction site at the analogous position in the human sequence.

[0142] Expression vectors include plasmids, retroviruses, YACs, EBV derived episomes, and the like. A convenient vector is one that encodes a functionally complete human CH or CL immunoglobulin sequence, with appropriate restriction sites engineered so that any VH or VL sequence can be easily inserted and expressed. In such vectors, splicing usually occurs between the splice donor site in the inserted J region and the splice acceptor site preceding the human C region, and also at the splice regions that occur within the human CH exons. Polyadenylation and transcription termination occur at native chromosomal sites downstream of the coding regions. The resulting chimeric antibody may be joined to any strong promoter, including retroviral LTRs, e.g. SV-40 early promoter, (Okayama et al. (1983) Mol. Cell. Bio. 3:280), Rous sarcoma virus LTR (Gorman et al. (1982) P.N.A.S. 79:6777), and moloney murine leukemia virus LTR (Grosschedl et al. (1985) Cell 41:885); native Ig promoters, etc.

[0143] Uses of the Subject Polypeptide and Nucleic Acid Compositions

[0144] The subject polypeptide and nucleic acid compositions find use in a variety of different applications, including research, diagnostic, and therapeutic agent screening/discovery/preparation applications, as well as therapeutic compositions.

[0145] General Applications

[0146] The subject nucleic acid compositions find use in a variety of different applications. Applications of interest include: the identification of homologs of the subject sulfatases; as a source of novel promoter elements; the identification of expression regulatory factors; as probes and primers in hybridization applications, e.g. polymerase chain reaction (PCR); the identification of expression patterns in biological specimens; the preparation of cell or animal models for function of the subject sulfatases; the preparation of in vitro models for function of the subject sulfatases; etc.

[0147] Homologs are identified by any of a number of methods. A fragment of the provided cDNA may be used as a hybridization probe against a cDNA library from the target organism of interest, where low stringency conditions are used. The probe may be a large fragment, or one or more short degenerate primers. Nucleic acids having sequence similarity are detected by hybridization under low stringency conditions, for example, at 50° C. and 6×SSC (0.9 M sodium chloride/0.09 M sodium citrate) and remain bound when subjected to washing at 55° C. in 1×SSC (0.15 M sodium chloride/0.01 5 M sodium citrate). Sequence identity may be determined by hybridization under stringent conditions, for example, at 50° C. or higher and 0.1×SSC (15 mM sodium chloride/01.5 mM sodium citrate). Nucleic acids having a region of substantial identity to the provided nucleic acid sequences, e.g. allelic variants, genetically altered versions of the gene, etc., bind to the provided sequences under stringent hybridization conditions. By using probes, particularly labeled probes of DNA sequences, one can isolate homologous or related genes.

[0148] The sequence of the 5′ flanking region may be utilized for promoter elements, including enhancer binding sites, that provide for developmental regulation in tissues where the subject genes are expressed. The tissue specific expression is useful for determining the pattern of expression, and for providing promoters that mimic the native pattern of expression. Naturally occurring polymorphisms in the promoter region are useful for determining natural variations in expression, particularly those that may be associated with disease.

[0149] Alternatively, mutations may be introduced into the promoter region to determine the effect of altering expression in experimentally defined systems. Methods for the identification of specific DNA motifs involved in the binding of transcriptional factors are known in the art, e.g. sequence similarity to known binding motifs, gel retardation studies, etc. For examples, see Blackwell et al. (1995), Mol. Med. 1:194-205; Mortlock et al. (1996), Genome Res. 6:327-33; and Joulin and Richard-Foy (1995), Eur. J. Biochem. 232:620-626.

[0150] The regulatory sequences may be used to identify cis acting sequences required for transcriptional or translational regulation of expression, especially in different tissues or stages of development, and to identify cis acting sequences and trans-acting factors that regulate or mediate expression. Such transcription or translational control regions may be operably linked to a gene in order to promote expression of wild type or proteins of interest in cultured cells, or in embryonic, fetal or adult tissues, and for gene therapy.

[0151] Small DNA fragments are useful as primers for PCR, hybridization screening probes, etc. Larger DNA fragments, i.e. greater than 100 nt are useful for production of the encoded polypeptide, as described in the previous section. For use in amplification reactions, such as PCR, a pair of primers will be used. The exact composition of the primer sequences is not critical to the invention, but for most applications the primers will hybridize to the subject sequence under stringent conditions, as known in the art. It is preferable to choose a pair of primers that will generate an amplification product of at least about 50 nt, preferably at least about 100 nt. Algorithms for the selection of primer sequences are generally known, and are available in commercial software packages. Amplification primers hybridize to complementary strands of DNA, and will prime towards each other.

[0152] The DNA may also be used to identify expression of the gene in a biological specimen. The manner in which one probes cells for the presence of particular nucleotide sequences, as genomic DNA or RNA, is well established in the literature. Briefly, DNA or mRNA is isolated from a cell sample. The mRNA may be amplified by RT-PCR, using reverse transcriptase to form a complementary DNA strand, followed by polymerase chain reaction amplification using primers specific for the subject DNA sequences. Alternatively, the mRNA sample is separated by gel electrophoresis, transferred to a suitable support, e.g. nitrocellulose, nylon, etc., and then probed with a fragment of the subject DNA as a probe. Other techniques, such as oligonucleotide ligation assays, in situ hybridizations, and hybridization to DNA probes arrayed on a solid chip may also find use. Detection of mRNA hybridizing to the subject sequence is indicative of gene expression in the sample.

[0153] The sequence of a gene according to the subject invention, including flanking promoter regions and coding regions, may be mutated in various ways known in the art to generate targeted changes in promoter strength, sequence of the encoded protein, etc. The DNA sequence or protein product of such a mutation will usually be substantially similar to the sequences provided herein, i.e. will differ by at least one nucleotide or amino acid, respectively, and may differ by at least two but not more than about ten nucleotides or amino acids. The sequence changes may be substitutions, insertions, deletions, or a combination thereof. Deletions may further include larger changes, such as deletions of a domain or exon. Other modifications of interest include epitope tagging, e.g. with the FLAG system, HA, etc. For studies of subcellular localization, fusion proteins with green fluorescent proteins (GFP) may be used.

[0154] Techniques for in vitro mutagenesis of cloned genes are known. Examples of protocols for site specific mutagenesis may be found in Gustin et al. (1993), Biotechniques 14:22; Barany (1985), Gene 37:111-23; Colicelli et al. (1985), Mol. Gen. Genet. 199:537-9; and Prentki et al. (1984), Gene 29:303-13. Methods for site specific mutagenesis can be found in Sambrook et al., Molecular Cloning: A Laboratory Manual, CSH Press 1989, pp. 15.3-15.108; Weiner et al. (1993), Gene 126:35-41; Sayers et al. (1992), Biotechniques 13:592-6; Jones and Winistorfer (1992), Biotechniques 12:528-30; Barton et al. (1990), Nucleic Acids Res 18:7349-55; Marotti and Tomich (1989), Gene Anal. Tech. 6:67-70; and Zhu (1989), Anal Biochem 177:120-4. Such mutated genes may be used to study structure-function relationships of the subject proteins, or to alter properties of the protein that affect its function or regulation.

[0155] The subject nucleic acids can be used to generate transgenic, non-human animals or site-specific gene modifications in cell lines. Thus, in some embodiments, the invention provides a non-human transgenic animal comprising, as a transgene integrated into the genome of the animal, a nucleic acid molecule comprising a sequence encoding a subject sulfatase in operable linkage with a promoter, such that the sulfatase-encoding nucleic acid molecule is expressed in a cell of the animal. Transgenic animals may be made through homologous recombination, where the endogenous locus is altered. Alternatively, a nucleic acid construct is randomly integrated into the genome. Vectors for stable integration include plasmids, retroviruses and other animal viruses, YACs, and the like.

[0156] The modified cells or animals are useful in the study of gene function and regulation. For example, a series of small deletions and/or substitutions may be made in the host's native gene to determine the role of different exons in oncogenesis, signal transduction, etc. Of interest is the use of genes to construct transgenic animal models for cancer, where expression of the subject protein is specifically reduced or absent. Specific constructs of interest include anti-sense constructs, which will block expression, expression of dominant negative mutations, and over-expression of genes. Where a sequence is introduced, the introduced sequence may be either a complete or partial sequence of a gene native to the host, or may be a complete or partial sequence that is exogenous to the host animal, e.g., a human sequence of the subject invention. A detectable marker, such as lac Z may be introduced into the locus, where upregulation of expression will result in an easily detected change in phenotype.

[0157] One may also provide for expression of the gene, e.g. the SULF1 or SULF2 gene, or variants thereof in cells or tissues where it is not normally expressed, at levels not normally present in such cells or tissues, or at abnormal times of development. One may also generate host cells (including host cells in transgenic animals) that comprise a heterologous nucleic acid molecule which encodes a polypeptide which functions to modulate expression of an endogenous SULF1 or SULF2 promoter or other transcriptional regulatory region.

[0158] DNA constructs for homologous recombination will comprise at least a portion of the human gene or of a gene native to the species of the host animal, wherein the gene has the desired genetic modification(s), and includes regions of homology to the target locus. DNA constructs for random integration need not include regions of homology to mediate recombination. Conveniently, markers for positive and negative selection are included. Methods for generating cells having targeted gene modifications through homologous recombination are known in the art. For various techniques for transfecting mammalian cells, see Keown et al. (1990), Meth. Enzymol. 185:527-537.

[0159] For embryonic stem (ES) cells, an ES cell line may be employed, or embryonic cells may be obtained freshly from a host, e.g. mouse, rat, guinea pig, etc. Such cells are grown on an appropriate fibroblast-feeder layer or grown in the presence of leukemia inhibiting factor (LIF). When ES or embryonic cells have been transformed, they may be used to produce transgenic animals. After transformation, the cells are plated onto a feeder layer in an appropriate medium. Cells containing the construct may be detected by employing a selective medium. After sufficient time for colonies to grow, they are picked and analyzed for the occurrence of homologous recombination or integration of the construct. Those colonies that are positive may then be used for embryo manipulation and blastocyst injection. Blastocysts are obtained from 4 to 6 week old superovulated females. The ES cells are trypsinized, and the modified cells are injected into the blastocoel of the blastocyst. After injection, the blastocysts are returned to each uterine horn of pseudopregnant females. Females are then allowed to go to term and the resulting offspring screened for the construct. By providing for a different phenotype of the blastocyst and the genetically modified cells, chimeric progeny can be readily detected.

[0160] The chimeric animals are screened for the presence of the modified gene and males and females having the modification are mated to produce homozygous progeny. If the gene alterations cause lethality at some point in development, tissues or organs can be maintained as allogeneic or congenic grafts or transplants, or in in vitro culture. The transgenic animals may be any non-human mammal, such as laboratory animals, domestic animals, etc. The transgenic animals may be used in functional studies, drug screening, etc., e.g. to determine the effect of a candidate drug on SULF1 or SULF2 activity.

[0161] Any method of making transgenic animals can be used as described, for example, in Transgenic Animal Generation and Use L. M. Houdebine, Harwood Academic Press, 1997; Transgenesis Techniques: Principles and Protocols D. Murphy and D. A. Carter, ed. (June 1993) Humana Press; Transgenic Animal Technology: A Laboratory Handbook C. A. Pinkert, ed. (January 1994) Academic Press; Transgenic Animals F. Grosveld and G Kollias, eds. (July 1992) Academic Press; and Embryonal Stem Cells: Introducing Planned Changes into the Animal Germline M. L. Hooper (January 1993) Gordon & Breach Science Pub; U.S. Pat. No. 6,344,596; U.S. Pat. No. 6,271,436; U.S. Pat. No. 6,218,596; and U.S. Pat. No. 6,204,431; Maga and Murray (1995) Bio/Technol. 13:1452-1457; Ebert et al. (1991) Bio/Technol. 9:835-838; Velander et al. (1992) Proc. Natl. Acad. Sci. USA 89:12003-12007; Wright et al. (1991) Bio/Technol. 9:830-834.

[0162] Diagnostic Applications

[0163] Also provided are methods of diagnosing disease states based on observed levels and/or activity of the subject sulfatase(s) and/or the level of a subject sulfatase polynucleotide in a biological sample of interest. Samples, as used herein, include biological fluids such as blood, cerebrospinal fluid, tears, saliva, lymph, dialysis fluid, breast ductal lavage fluid, semen and the like; cells; organ or tissue culture derived fluids; tumor biopsy samples; stool samples; and fluids extracted from physiological tissues. Also included in the term are derivatives and fractions of such fluids. The cells may be dissociated, in the case of solid tissues, or tissue sections may be analyzed. Alternatively a lysate of the cells may be prepared.

[0164] Assay methods of the invention may be qualitative or quantitative. Thus, as used herein, the terms “detection,” “determination,” and the like, refer to both qualitative and quantitative determinations, and include “measuring.”

[0165] Detection methods of the present invention include methods for detecting sulfatase polypeptide in a biological sample, methods for detecting sulfatase mRNA in a biological sample, and methods for detecting sulfatase enzymatic activity in a biological sample.

[0166] In some embodiments, the detection methods provide for detection of cancerous cells in a biological sample (e.g., a tissue biopsy). As described in the Examples, huSULF-1 mRNA levels are elevated in particular cancers, e.g., pancreatic cancer and prostate cancer; and huSULF-2 mRNA levels are elevated in breast cancer. Thus, detection of an mRNA encoding huSULF-1 or huSULF-2 at an elevated level compared to normal (non-cancerous) tissue, provides for detection of cancerous tissue in a biological sample.

[0167] Detection Kits

[0168] The detection methods can be provided as part of a kit. Thus, the invention further provides kits for detecting the presence and/or a level of sulfatase polypeptide or sulfatase polynucleotide in a biological sample. Procedures using these kits can be performed by clinical laboratories, experimental laboratories, medical practitioners, or private individuals. The kits of the invention for detecting a sulfatase polypeptide comprise a moiety that specifically binds sulfatase, including, but not limited to, a sulfatase-specific antibody. The kits of the invention for detecting a sulfatase polynucleotide comprise a moiety that specifically hybridizes to a sulfatase polynucleotide.

[0169] In some embodiments, a kit of the invention for detecting a sulfatase polynucleotide, such as an mRNA encoding a subject sulfatase, comprises a pair of nucleic acids that function as “forward” and “reverse” primers that specifically amplify a cDNA copy of a subject sulfatase-encoding mRNA. The “forward” and “reverse” primers are provided in the kit as a pair of isolated nucleic acid molecules, each from about 10 to 200 nucleotides in length, the first nucleic acid molecule of the pair comprising a sequence of at least 10 contiguous nucleotides having 100% sequence identity to the nucleic acid sequence set forth in any one of SEQ ID NO:02, 05, or 14, and the second nucleic acid molecule of the pair comprising a sequence of at least 10 contiguous nucleotides having 100% sequence identity to the reverse complement of the nucleic acid sequence set forth in any one of SEQ ID NO:02, 05, or 14, wherein the sequence of the second nucleic acid molecule is located 3′ of the nucleic acid sequence of the first nucleic acid molecule in any one of SEQ ID NO:02, 05, or 14. The primer nucleic acids are prepared using any known method, e.g., automated synthesis, and the like.

[0170] The invention provides a kit comprising a pair of nucleic acids as described above. The nucleic acids are present in a suitable storage medium, e.g., buffered solution, typically in a suitable container. The kit includes the pair of nucleic acids, and may further include a buffer; reagents for polymerase chain reaction (e.g., deoxynucleotide triphosphates (dATP, dTTP, dCTP, and dGTP), a thermostable DNA polymerase, a buffer suitable for polymerase chain reaction, a solution containing Mg²⁺ ions (e.g., MgCl₂), and other components well known to those skilled in the art for carrying out a polymerase chain reaction). The kit may further include instructions for use of the kit, which instructions may be provided in a variety of forms, e.g., as printed information, on a compact disc, and the like. The kit may further include reagents necessary for extraction of DNA from a biological sample (e.g., biopsy sample, blood, and the like) from an individual, and reagents for generating a cDNA copy of an mRNA. The kits are useful in diagnostic applications, as described in more detail below. The pair of isolated nucleic acid molecules serve as primers in an amplification reaction (e.g., a polymerase chain reaction).

[0171] In some embodiments, the first and/or the second nucleic acid molecules comprises a detectable label. Suitable labels include fluorochromes, e.g. fluorescein isothiocyanate (FITC), rhodamine, Texas Red, phycoerythrin, allophycocyanin, 6-carboxyfluorescein (6-FAM), 2′,7′-dimethoxy-4′,5′-dichloro-6-carboxyfluorescein (JOE), 6-carboxy-X-rhodamine (ROX), 6-carboxy-2′,4′,7′,4,7-hexachlorofluorescein (HEX), 5-carboxyfluorescein (5-FAM) or N,N,N′,N′-tetramethyl-6-carboxyrhodamine (TAMRA), radioactive labels, e.g. ³²P, 35S, ³H; etc. The label may be a two stage system, where the amplified DNA is conjugated to biotin, haptens, etc. having a high affnity binding partner, e.g. avidin, specific antibodies, etc., where the binding partner is conjugated to a detectable label. The label may be conjugated to one or both of the primers. Alternatively, the pool of nucleotides used in the amplification is labeled, so as to incorporate the label into the amplification product.

[0172] The kit may optionally provide additional components that are useful in the procedure, including, but not limited to, buffers, developing reagents, labels, reacting surfaces, means for detections, control samples, standards, instructions, and interpretive information.

[0173] Where the kit provides for detection of a subject sulfatase polypeptide, the kit includes one or more antibodies specific for the subject sulfatase. In some embodiments, the antibody specific for the subject sulfatase is detectably labeled. In other embodiments, the antibody specific for the subject sulfatase is not labeled; instead, a second, detectably-labeled antibody is provided that binds to the antibody specific for a subject sulfatase (the “first” antibody). The kit may further include blocking reagents, buffers, and reagents for developing and/or detecting the detectable marker. The kit may further include instructions for use, controls, and interpretive information.

[0174] Where the kit provides for detecting enzymatic activity of a subject sulfatase, the kit includes a substrate that provides for a detectable product when acted upon by a subject sulfatase. Suitable substrates are discussed in detail below. One non-limiting example of a suitable substrate is 4-methylumbelliferyl-sulfate. The kit may further include reagents necessary for detectable marker development and detection. The kit may further include instructions for use, controls, and interpretive information.

[0175] Methods of Detecting a Sulfatase Polypeptide in a Biological Sample

[0176] The present invention further provides methods for detecting the presence and/or measuring a level of a sulfatase polypeptide in a biological sample, using a sulfatase-specific antibody. The methods generally comprise:

[0177] a) contacting the sample with an antibody specific for a sulfatase polypeptide; and

[0178] b) detecting binding between the antibody and molecules of the sample.

[0179] Detection of specific binding of the sulfatase-specific antibody, when compared to a suitable control, is an indication that sulfatase polypeptides are present in the sample. Suitable controls include a sample known not to contain a sulfatase polypeptide; and a sample contacted with an antibody not specific for sulfatase, e.g., an anti-idiotype antibody. A variety of methods to detect specific antibody-antigen interactions are known in the art and can be used in the method, including, but not limited to, standard immunohistological methods, immunoprecipitation, an enzyme immunoassay, and a radioimmunoassay. In general, the sulfatase-specific antibody will be detectably labeled, either directly or indirectly. Direct labels include radioisotopes; enzymes whose products are detectable (e.g., luciferase, β-galactosidase, and the like); fluorescent labels (e.g., fluorescein isothiocyanate, rhodamine, phycoerythrin, and the like); fluorescence emitting metals, e.g., ¹⁵²Eu, or others of the lanthanide series, attached to the antibody through metal chelating groups such as EDTA; chemiluminescent compounds, e.g., luminol, isoluminol, acridinium salts, and the like; bioluminescent compounds, e.g., luciferin, aequorin (green fluorescent protein), and the like.

[0180] The antibody may be attached (coupled) to an insoluble support, such as a polystyrene plate or a bead. Indirect labels include second antibodies specific for sulfatase-specific antibodies, wherein the second antibody is labeled as described above; and members of specific binding pairs, e.g., biotin-avidin, and the like. The biological sample may be brought into contact with an immobilized on a solid support or carrier, such as nitrocellulose, that is capable of immobilizing cells, cell particles, or soluble proteins. The support may then be washed with suitable buffers, followed by contacting with a detectably-labeled sulfatase-specific antibody. Detection methods are known in the art and will be chosen as appropriate to the signal emitted by the detectable label. Detection is generally accomplished in comparison to suitable controls, and to appropriate standards.

[0181] Methods of Detecting Enzymatic Activity of a Subject Sulfatase in a Biological Sample

[0182] The present invention further provides methods for detecting the presence and/or levels of enzymatic activity of a subject sulfatase in a biological sample. The methods generally involve:

[0183] a) contacting the sample with a substrate that yields a detectable product upon being acted upon by a subject sulfatase; and

[0184] b) detecting a product of the enzymatic reaction.

[0185] Any sulfated compound that, upon cleavage of the sulfate group by the sulfatase activity, results in a change in absorption, fluorescence or other physical property amenable to detection, is suitable for use in a subject assay. Suitable substrates include, but are not limited to, 4-methylumbelliferyl sulfate; p-nitrophenyl sulfate; 4-methylumbelliferyl-α-D-N-acetylglucosamide-6-sulfate or 4-methylumbelliferyl-glucosamine-6-sulfate or conjugates containing these derivatives; any sulfated sugar or assembly of sugars related to heparan sulfate, including fragments of heparin or heparan sulfate; and any sulfated compound in which the sulfate is radiolabeled.

[0186] Methods of Detecting a Sulfatase mRNA in a Biological Sample

[0187] The present invention further provides methods for detecting the presence of sulfatase mRNA in a biological sample. The methods can be used, for example, to assess whether a test compound affects sulfatase gene expression, directly or indirectly.

[0188] The methods generally comprise:

[0189] a) contacting the sample with a sulfatase polynucleotide of the invention under conditions which allow hybridization; and

[0190] b) detecting hybridization, if any.

[0191] Detection of hybridization, when compared to a suitable control, is an indication of the presence in the sample of a sulfatase polynucleotide. Appropriate controls include, for example, a sample which is known not to contain sulfatase mRNA, and use of a labelled polynucleotide of the same “sense” as a sulfatase mRNA. Conditions which allow hybridization are known in the art, and have been described in more detail above. Detection can be accomplished by any known method, including, but not limited to, in situ hybridization, PCR, RT-PCR, and “Northern” or RNA blotting, or combinations of such techniques, using a suitably labelled sulfatase polynucleotide. A variety of labels and labelling methods for polynucleotides are known in the art and can be used in the assay methods of the invention. Specific hybridization can be determined by comparison to appropriate controls.

[0192] In some embodiments, the methods involve generating a cDNA copy of an mRNA molecule in a biological sample, and amplifying the cDNA using a pair of isolated nucleic acid molecules that serve as forward and reverse primers in an amplification reaction (e.g., a polymerase chain reaction). Each of the nucleic acid molecules in the pair of nuclei acid molecules is from about 10 to 200 nucleotides in length, the first nucleic acid molecule of the pair comprising a sequence of at least 10 contiguous nucleotides having 100% sequence identity to the nucleic acid sequence set forth in any one of SEQ ID NO:02, 05, or 14, and the second nucleic acid molecule of the pair comprising a sequence of at least 10 contiguous nucleotides having 100% sequence identity to the reverse complement of the nucleic acid sequence set forth in any one of SEQ ID NO:02, 05, or 14, wherein the sequence of the second nucleic acid molecule is located 3′ of the nucleic acid sequence of the first nucleic acid molecule in any one of SEQ ID NO:02, 05, or 14. The primer nucleic acids are prepared using any known method, e.g., automated synthesis, and the like. The primer pairs are chosen such that they specifically amplify a cDNA copy of an mRNA encoding a subject sulfatase.

[0193] Methods using PCR amplification can be performed on the DNA from a single cell, although it is convenient to use at least about 10⁵ cells. The use of the polymerase chain reaction is described in Saiki et al. (1985) Science 239:487, and a review of current techniques may be found in Sambrook, et al. Molecular Cloning: A Laboratory Manual, CSH Press 1989, pp.14.2B14.33. A detectable label may be included in the amplification reaction. Suitable labels include fluorochromes, e.g. fluorescein isothiocyanate (FITC), rhodamine, Texas Red, phycoerythrin, allophycocyanin, 6-carboxyfluorescein (6-FAM), 2′,7′-dimethoxy-4′,5′-dichloro-6-carboxyfluorescein (JOE), 6-carboxy-X-rhodamine (ROX), 6-carboxy-2′,4′,7′,4,7-hexachlorofluorescein (HEX), 5-carboxyfluorescein (5-FAM) or N,N,N′,N′-tetramethyl-6-carboxyrhodamine (TAMRA), radioactive labels, e.g. ³²P, ³⁵S, ³H; etc. The label may be a two stage system, where the amplified DNA is conjugated to biotin, haptens, etc. having a high affnity binding partner, e.g. avidin, specific antibodies, etc., where the binding partner is conjugated to a detectable label. The label may be conjugated to one or both of the primers. Alternatively, the pool of nucleotides used in the amplification is labeled, so as to incorporate the label into the amplification product.

[0194] A number of methods are available for determining the expression level of a gene or protein in a particular sample. Diagnosis may be performed by a number of methods to determine the absence or presence or altered amounts of normal or abnormal sulfatase in a patient sample. For example, detection may utilize staining of cells or histological sections with labeled antibodies, performed in accordance with conventional methods. Cells are permeabilized to stain cytoplasmic molecules. The antibodies of interest are added to the cell sample, and incubated for a period of time sufficient to allow binding to the epitope, usually at least about 10 minutes. The antibody may be labeled with radioisotopes, enzymes, fluorescers, chemiluminescers, or other labels for direct detection. Alternatively, a second stage antibody or reagent is used to amplify the signal. Such reagents are well known in the art. For example, the primary antibody may be conjugated to biotin, with horseradish peroxidase-conjugated avidin added as a second stage reagent. Alternatively, the secondary antibody conjugated to a fluorescent compound, e.g. fluorescein, rhodamine, Texas red, etc. Final detection uses a substrate that undergoes a color change in the presence of the peroxidase. The absence or presence of antibody binding may be determined by various methods, including flow cytometry of dissociated cells, microscopy, radiography, scintillation counting, etc.

[0195] Alternatively, one may focus on the expression of the subject sulfatase genes. Biochemical studies may be performed to determine whether a sequence polymorphism in a coding region or control regions is associated with disease. Disease associated polymorphisms may include deletion or truncation of the gene, mutations that alter expression level, that affect the activity of the protein, etc.

[0196] Changes in the promoter or enhancer sequence that may affect expression levels of the subject genes can be compared to expression levels of the normal allele by various methods known in the art. Methods for determining promoter or enhancer strength include quantitation of the expressed natural protein; insertion of the variant control element into a vector with a reporter gene such as β-galactosidase, luciferase, chloramphenicol acetyltransferase, etc. that provides for convenient quantitation; and the like.

[0197] A number of methods are available for analyzing nucleic acids for the presence of a specific sequence, e.g. a disease associated polymorphism. Where large amounts of DNA are available, genomic DNA is used directly. Alternatively, the region of interest is cloned into a suitable vector and grown in sufficient quantity for analysis. Cells that express the gene may be used as a source of mRNA, which may be assayed directly or reverse transcribed into cDNA for analysis. The nucleic acid may be amplified by conventional techniques, such as the polymerase chain reaction (PCR), to provide sufficient amounts for analysis. The use of the polymerase chain reaction is described in Saiki, et al. (1985), Science 239:487, and a review of techniques may be found in Sambrook, et al. Molecular Cloning: A Laboratory Manual, CSH Press 1989, pp.14.2-14.33. Alternatively, various methods are known in the art that utilize oligonucleotide ligation as a means of detecting polymorphisms, for examples see Riley et al. (1990), Nucl. Acids Res. 18:2887-2890; and Delahunty et al. (1996), Am. J. Hum. Genet. 58:1239-1246.

[0198] A detectable label may be included in an amplification reaction. Suitable labels include fluorochromes, e.g. fluorescein isothiocyanate (FITC), rhodamine, Texas Red, phycoerythrin, allophycocyanin, 6-carboxyfluorescein (6-FAM), 2′,7′-dimethoxy-4′,5′-dichloro-6-carboxyfluorescein (JOE), 6-carboxy-X-rhodamine (ROX), 6-carboxy-2′,4′,7′,4,7-hexachlorofluorescein (HEX), 5-carboxyfluorescein (5-FAM) or N,N,N′,N′-tetramethyl-6-carboxyrhodamine (TAMRA), radioactive labels, e.g. ³²P, ³⁵S, ³H; etc. The label may be a two stage system, where the amplified DNA is conjugated to biotin, haptens, etc. having a high affinity binding partner, e.g. avidin, specific antibodies, etc., where the binding partner is conjugated to a detectable label. The label may be conjugated to one or both of the primers. Alternatively, the pool of nucleotides used in the amplification is labeled, so as to incorporate the label into the amplification product.

[0199] The sample nucleic acid, e.g. amplified or cloned fragment, is analyzed by one of a number of methods known in the art. The nucleic acid may be sequenced by dideoxy or other methods, and the sequence of bases compared to a wild-type sequence. Hybridization with the variant sequence may also be used to determine its presence, by Southern blots, dot blots, etc. The hybridization pattern of a control and variant sequence to an array of oligonucleotide probes immobilized on a solid support, as described in U.S. Pat. No. 5,445,934, or in WO 95/35505, may also be used as a means of detecting the presence of variant sequences. Single strand conformational polymorphism (SSCP) analysis, denaturing gradient gel electrophoresis (DGGE), and heteroduplex analysis in gel matrices are used to detect conformational changes created by DNA sequence variation as alterations in electrophoretic mobility. Alternatively, where a polymorphism creates or destroys a recognition site for a restriction endonuclease, the sample is digested with that endonuclease, and the products size fractionated to determine whether the fragment was digested. Fractionation is performed by gel or capillary electrophoresis, particularly acrylamide or agarose gels.

[0200] Screening for mutations in the gene may be based on the functional or antigenic characteristics of the protein. Protein truncation assays are useful in detecting deletions that may affect the biological activity of the protein. Various immunoassays designed to detect polymorphisms in proteins may be used in screening. Where many diverse genetic mutations lead to a particular disease phenotype, functional protein assays have proven to be effective screening tools. The activity of the encoded protein may be determined by comparison with the wild-type protein.

[0201] Diagnostic methods of the subject invention in which the level of expression is of interest will typically involve comparison of the nucleic acid abundance of a sample of interest with that of a control value to determine any relative differences, where the difference may be measured qualitatively and/or quantitatively, which differences are then related to the presence or absence of an abnormal expression pattern. A variety of different methods for determining the nucleic acid abundance in a sample are known to those of skill in the art, where particular methods of interest include those described in: Pietu et al., Genome Res. (June 1996) 6: 492-503; Zhao et al., Gene (Apr. 24, 1995) 156: 207-213; Soares, Curr. Opin. Biotechnol. (October 1997) 8: 542-546; Raval, J. Pharmacol Toxicol Methods (November 1994) 32: 125-127; Chalifour et al., Anal. Biochem (Feb. 1, 1994) 216: 299-304; Stolz & Tuan, Mol. Biotechnol. (December 19960 6: 225-230; Hong et al., Bioscience Reports (1982) 2: 907; and McGraw, Anal. Biochem. (1984) 143: 298. Also of interest are the methods disclosed in WO 97/27317, the disclosure of which is herein incorporated by reference.

[0202] Screening Assays

[0203] The present invention provides in vitro screening methods. The screening methods include methods for identifying agents which modulate sulfatase enzyme activity, methods for identifying agents which modulate a level of a subject sulfatase polypeptide in a cell; and methods for identifying agents which modulate a level of a subject sulfatase mRNA in a cell; methods for identifying an agent that modulates substrate recognition by a subject sulfatase; methods for identifying an agent that reduces binding of a coiled-coil domain of a subject sulfatase with a second protein; and methods for identifying agents that modulate release of a subject sulfatase from a eukaryotic cell. In some embodiments, the assay is a cell-free assay. In other embodiments, the assay is a cell-based assay.

[0204] As used herein, the term “modulate” encompasses “increase” and “decrease.” In some embodiments, of particular interest are agents which inhibit sulfatase activity, and/or which reduce a level of a subject sulfatase polypeptide in a cell, and/or which reduce a level of a subject sulfatase mRNA in a cell and/or which reduce release of a subject sulfatase from a eukaryotic cell. Such agents are of interest as candidates for treating cancers. In other embodiments, agents of interest are those that increase sulfatase activity; such agents are of interest as candidates for treating disorders amenable to treatment by increasing angiogenesis, e.g., ischemic conditions.

[0205] The terms “candidate agent,” “test agent,” “agent”, “substance” and “compound” are used interchangeably herein. Candidate agents encompass numerous chemical classes, typically synthetic, semi-synthetic, or naturally-occurring inorganic or organic molecules. Candidate agents may be small organic compounds having a molecular weight of more than 50 and less than about 2,500 daltons. Candidate agents may comprise functional groups necessary for structural interaction with proteins, particularly hydrogen bonding, and may include at least an amine, carbonyl, hydroxyl or carboxyl group, and may contain at least two of the functional chemical groups. The candidate agents may comprise cyclical carbon or heterocyclic structures and/or aromatic or polyaromatic structures substituted with one or more of the above functional groups. Candidate agents are also found among biomolecules including peptides, saccharides, fatty acids, steroids, purines, pyrimidines, derivatives, structural analogs or combinations thereof.

[0206] Candidate agents are obtained from a wide variety of sources including libraries of synthetic or natural compounds. For example, numerous means are available for random and directed synthesis of a wide variety of organic compounds and biomolecules, including expression of randomized oligonucleotides and oligopeptides. Alternatively, libraries of natural compounds in the form of bacterial, fungal, plant and animal extracts are available or readily produced. Additionally, natural or synthetically produced libraries and compounds are readily modified through conventional chemical, physical and biochemical means, and may be used to produce combinatorial libraries. Known pharmacological agents may be subjected to directed or random chemical modifications, such as acylation, alkylation, esterification, amidification, etc. to produce structural analogs.

[0207] Where the screening assay is a binding assay, one or more of the molecules may be joined to a label, where the label can directly or indirectly provide a detectable signal. Various labels include radioisotopes, fluorescers, chemiluminescers, enzymes, specific binding molecules, particles, e.g. magnetic particles, and the like. Specific binding molecules include pairs, such as biotin and streptavidin, digoxin and antidigoxin etc. For the specific binding members, the complementary member would normally be labeled with a molecule that provides for detection, in accordance with known procedures.

[0208] A variety of other reagents may be included in the screening assay. These include reagents like salts, neutral proteins, e.g. albumin, detergents, etc that are used to facilitate optimal protein-protein binding and/or reduce non-specific or background interactions. Reagents that improve the efficiency of the assay, such as protease inhibitors, nuclease inhibitors, anti-microbial agents, etc. may be used. The mixture of components are added in any order that provides for the requisite binding. Incubations are performed at any suitable temperature, typically between 4° C. and 40° C. Incubation periods are selected for optimum activity, but may also be optimized to facilitate rapid high-throughput screening. Typically between 0.1 and 1 hour will be sufficient.

[0209] A variety of other reagents may be included in the screening assay. These include reagents like salts, neutral proteins, e.g. albumin, detergents, etc that are used to facilitate optimal protein-protein binding and/or reduce non-specific or background interactions. Reagents that improve the efficiency of the assay, such as protease inhibitors, nuclease inhibitors, anti-microbial agents, etc. may be used.

[0210] The screening methods may be designed a number of different ways, where a variety of assay configurations and protocols may be employed, as are known in the art. For example, one of the components may be bound to a solid support, and the remaining components contacted with the support bound component. The components of the method may be combined at substantially the same time or at different times. Incubations are performed at any suitable temperature, typically between 4 and 40° C. Incubation periods are selected for optimum activity, but may also be optimized to facilitate rapid high-throughput screening. Typically between 0.1 and 1 hours will be sufficient. Following the contact and incubation steps, the subject methods will generally, though not necessarily, further include a washing step to remove unbound components, where such a washing step is generally employed when required to remove label that would give rise to a background signal during detection, such as radioactive or fluorescently labeled non-specifically bound components. Following the optional washing step, the presence of bound complexes will then be detected.

[0211] Generally a plurality of assays are run in parallel with different agent concentrations to obtain a differential response to the various concentrations. Typically, one of these concentrations serves as a negative control, i.e. at zero concentration or below the level of detection.

[0212] Methods for Identifying Agents that Modulate Sulfatase Activity

[0213] The present invention provides methods of identifying agents that modulate an enzymatic activity of a sulfatase polypeptide of the invention. In many embodiments, the methods are in vitro cell-free methods. The term “modulate” encompasses an increase or a decrease in the measured sulfatase activity when compared to a suitable control.

[0214] The method generally comprises:

[0215] a) contacting a test agent with a sample containing a sulfatase polypeptide; and

[0216] b) assaying a sulfatase activity of the sulfatase polypeptide in the presence of the substance. An increase or a decrease in sulfatase activity in comparison to sulfatase activity in a suitable control (e.g., a sample comprising a sulfatase polypeptide in the absence of the substance being tested) is an indication that the substance modulates an enzymatic activity of the sulfatase.

[0217] An “agent which modulates a sulfatase activity of a sulfatase polypeptide”, as used herein, describes any molecule, e.g. synthetic or natural organic or inorganic compound, protein or pharmaceutical, with the capability of altering a sulfatase activity of a sulfatase polypeptide, as described herein. Generally a plurality of assay mixtures is run in parallel with different agent concentrations to obtain a differential response to the various concentrations. Typically, one of these concentrations serves as a negative control, i.e. at zero concentration or below the level of detection. Sulfatase activity can be measured using any sulfatase assay known in the art.

[0218] In many embodiments, the methods are in vitro cell-free methods. The sulfatase polypeptide may be, but need not be, purified in carrying out the methods. The sulfatase may be a full-length sulfatase polypeptide; a fragment that retains sulfatase activity (e.g., a sulfatase domain); or fusion polypeptide that includes a sulfatase domain and a heterologous protein.

[0219] Any sulfated compound that, upon cleavage of the sulfate group by the sulfatase activity, results in a change in absorption, fluorescence or other physical property amenable to detection, is suitable for use in a subject assay. Suitable substrates include, but are not limited to, 4-methylumbelliferyl sulfate; p-nitrophenyl sulfate; 4-methylumbelliferyl-α-D-N-acetylglucosamide-6-sulfate or 4-methylumbelliferyl-glucosamine-6-sulfate or conjugates containing these derivatives; any sulfated sugar or assembly of sugars related to heparan sulfate, including fragments of heparin or heparan sulfate; and any sulfated compound in which the sulfate is radiolabeled.

[0220] In certain embodiments, a substrate comprising a ³⁵S label is used. Release of ³⁵S is measured using any appropriate assay, e.g., scintillation counting, and the like.

[0221] In other embodiments, the substrate comprises a sulfated moiety that provides a detectable signal once the sulfate is released by action of the sulfatase. In a particular embodiment, the substrate is 4-methylumbelliferyl-sulfate. The reaction product of the action of a subject sulfatase on 4-methylumbelliferyl sulfate is 4-methylumbelliferone, which is a fluorescent compound. The product 4-methylumbelliferone is detected by an excitation wavelength of about 360 nm, whereupon the product emits at about 460 nm. Generally, the reaction includes 4-methylumbelliferyl-sulfate at about 10 mM, and 10 mM lead acetate. The reaction is carried out at 37° C. If desired, the reaction is stopped by addition of an excess of 0.5 M Na₂CO₃/NaHCO₃, pH 10.7. Sulfatase activity is detected by measuring fluorescence. This assay is particularly suited to a high through-put format.

[0222] An agent which modulates a sulfatase activity of a subject polypeptide increases or decreases the activity at least about 10%, at least about 15%, at least about 20%, at least about 25%, more preferably at least about 50%, more preferably at least about 100%, or 2-fold, more preferably at least about 5-fold, more preferably at least about 10-fold or more when compared to a suitable control.

[0223] Agents that increase or decrease a sulfatase activity of a subject polypeptide to the desired extent may be selected for further study, and assessed for cellular availability, cytotoxicity, biocompatibility, etc.

[0224] Of particular interest in some embodiments are agents that decrease a sulfatase activity of a subject polypeptide. Maximal inhibition of sulfatase activity is not always necessary, or even desired, in every instance to achieve a therapeutic effect. Agents which decrease a sulfatase activity of a subject polypeptide may find use in reducing angiogenesis stimulated by a tumor cell and thus may be useful in treating cancers.

[0225] Of particular interest in some embodiments are agents that increase a sulfatase activity of a subject polypeptide. Agents which increase a sulfatase activity of a subject polypeptide may find use in increasing angiogenesis and thus may be useful in treating ischemic conditions.

[0226] Cell-Based Methods

[0227] Cell-based methods include methods of detecting an agent that modulates a level of a subject sulfatase mRNA and/or subject sulfatase polypeptides, and methods for detecting an agent that modulates release of a subject sulfatase from a eukaryotic cell.

[0228] A candidate agent is assessed for any cytotoxic activity it may exhibit toward the cell used in the assay, using well-known assays, such as trypan blue dye exclusion, an MTT ([3-(4,5-dimethylthiazol-2-yl)-2,5-diphenyl-2 H-tetrazolium bromide]) assay, and the like. Agents that do not exhibit cytotoxic activity are considered candidate agents.

[0229] The cells used in the assay are usually mammalian cells, including, but not limited to, rodent cells and human cells. The cells may be primary cell cultures or may be immortalized cell lines.

[0230] Methods of Detecting Agents that Modulate a Level of Sulfatase mRNA and/or Sulfatase Polypeptide

[0231] A wide variety of cell-based assays may be used for identifying agents which modulate levels of sulfatase mRNA and for identifying agents that modulate release of a sulfatase from a eukaryotic cell, using, for example, a mammalian cell transformed with a construct comprising a sulfatase-encoding cDNA such that the cDNA is overexpressed, or, alternatively, a construct comprising a sulfatase promoter operably linked to a reporter gene.

[0232] Accordingly, the present invention provides a method for identifying an agent, particularly a biologically active agent, that modulates a level of sulfatase expression in a cell, the method comprising: combining a candidate agent to be tested with a cell comprising a nucleic acid which encodes a sulfatase polypeptide; and determining the effect of said agent on sulfatase expression. “Modulation” of sulfatase expression levels includes increasing the level and decreasing the level of sulfatase mRNA and/or sulfatase polypeptide encoded by the sulfatase polynucleotide when compared to a control lacking the agent being tested. An increase or decrease of about 1.25-fold, usually at least about 1.5-fold, usually at least about 2-fold, usually at least about 5-fold, usually at least about 10-fold or more, in the level (i.e., an amount) of sulfatase mRNA and/or polypeptide following contacting the cell with a candidate agent being tested, compared to a control to which no agent is added, is an indication that the agent modulates sulfatase expression.

[0233] Sulfatase mRNA and/or polypeptide whose levels are being measured can be encoded by an endogenous sulfatase polynucleotide, or the sulfatase polynucleotide can be one that is comprised within a recombinant vector and introduced into the cell, i.e., the sulfatase mRNA and/or polypeptide can be encoded by an exogenous sulfatase polynucleotide. For example, a recombinant vector may comprise an isolated sulfatase transcriptional regulatory sequence, such as a promoter sequence, operably linked to a reporter gene (e.g,. β-galactosidase, CAT, luciferase, or other gene that can be easily assayed for expression). In these embodiments, the method for identifying an agent that modulates a level of sulfatase expression in a cell, comprises: combining a candidate agent to be tested with a cell comprising a nucleic acid which comprises a sulfatase gene transcriptional regulatory element operably linked to a reporter gene; and determining the effect of said agent on reporter gene expression. A recombinant vector may comprise an isolated sulfatase transcriptional regulatory sequence, such as a promoter sequence, operably linked to sequences coding for a sulfatase polypeptide; or the transcriptional control sequences can be operably linked to coding sequences for a sulfatase fusion protein comprising sulfatase polypeptide fused to a polypeptide which facilitates detection. In these embodiments, the method comprises combining a candidate agent to be tested with a cell comprising a nucleic acid which comprises a sulfatase gene transcriptional regulatory element operably linked to a sulfatase polypeptide-coding sequence; and determining the effect of said agent on sulfatase expression, which determination can be carried out by measuring an amount of sulfatase mRNA, sulfatase polypeptide, or sulfatase fusion polypeptide produced by the cell.

[0234] Cell-based assays generally comprise the steps of contacting the cell with an agent to be tested, forming a test sample, and, after a suitable time, assessing the effect of the agent on sulfatase expression. A control sample comprises the same cell without the candidate agent added. Sulfatase expression levels are measured in both the test sample and the control sample. A comparison is made between sulfatase expression level in the test sample and the control sample. Sulfatase expression can be assessed using conventional assays. For example, when a mammalian cell line is transformed with a construct that results in expression of sulfatase, sulfatase mRNA levels can be detected and measured, as described above, or sulfatase polypeptide levels can be detected and measured, as described above. A suitable period of time for contacting the agent with the cell can be determined empirically, and is generally a time sufficient to allow entry of the agent into the cell and to allow the agent to have a measurable effect on sulfatase mRNA and/or polypeptide levels. Generally, a suitable time is between 10 minutes and 24 hours, more typically about 1-8 hours.

[0235] Methods of measuring sulfatase mRNA levels are known in the art, several of which have been described above, and any of these methods can be used in the methods of the present invention to identify an agent which modulates sulfatase mRNA level in a cell, including, but not limited to, a PCR, such as a PCR employing detectably labeled oligonucleotide primers, and any of a variety of hybridization assays. Similarly, sulfatase polypeptide levels can be measured using any standard method, several of which have been described herein, including, but not limited to, an immunoassay such as ELISA, for example an ELISA employing a detectably labeled antibody specific for a sulfatase polypeptide.

[0236] Methods of Detecting Agents that Modulate Release of a Subject Sulfatase from a Eukaryotic Cell

[0237] Methods for identifying agents that modulate release of a sulfatase from a eukaryotic cell generally comprise contacting a cell that normally produces a subject sulfatase with a test agent, and determining the effect, if any, on release of the subject sulfatase.

[0238] “Modulation” of release of a subject sulfatase from a eukaryotic cell includes increasing the level and decreasing the level of release of a subject sulfatase from a eukaryotic cell when compared to a control lacking the agent being tested. An increase or decrease of about 1.25-fold, usually at least about 1.5-fold, usually at least about 2-fold, usually at least about 5-fold, usually at least about 10-fold or more, in the level (i.e., an amount) of sulfatase mRNA and/or polypeptide following contacting the cell with a candidate agent being tested, compared to a control to which no agent is added, is an indication that the agent modulates release of a subject sulfatase from a eukaryotic cell.

[0239] Cell-based assays generally comprise the steps of contacting the cell with an agent to be tested, forming a test sample, and, after a suitable time, assessing the effect of the agent on release of a subject sulfatase from a eukaryotic cell. A control sample comprises the same cell without the candidate agent added. Release of a subject sulfatase from a eukaryotic cell is measured in both the test sample and the control sample. A comparison is made between release of a subject sulfatase from a eukaryotic cell in the test sample and the control sample. Release of a subject sulfatase from a eukaryotic cell can be assessed using conventional assays to measure sulfatase activity. For example, when a mammalian cell line is transformed with a construct that results in expression of sulfatase, sulfatase enzymatic activity released from the cell can be detected and measured, as described above, or sulfatase polypeptide levels can be detected and measured, as described above. A suitable period of time for contacting the agent with the cell can be determined empirically, and is generally a time sufficient to allow entry of the agent into the cell (if necessary), or any other interaction wuth the cell, e.g., with cell-surface components) and to allow the agent to have a measurable effect on sulfatase release. Generally, a suitable time is between 10 minutes and 24 hours, more typically about 1-8 hours.

[0240] Methods for Identifying an Agent that Modulates Substrate Recognition by a Subject Sulfatase

[0241] The invention further provides methods of identifying an agent that modulate substrate recognition by a subject sulfatase. The methods generally involve contacting a subject sulfatase with a test agent, and determining the effect, if any, of the agent on substrate recognition. In some embodiments, the assay is a cell-free assay.

[0242] Polypeptides that are suitable for use in the instant methods include a full-length subject sulfatase polypeptide; a fragment of a subject sulfatase that includes a G6S-related domain; a fusion polypeptide that includes a G6S-related domain of a subject sulfatase and a heterologous polypeptide fused in-frame; a G6S-related domain of a subject sulfatase.

[0243] Agents of interest include those that reduce substrate recognition by at least about 10%, at least about 20%, at least about 30%, at least about 40%, at least about 50%, or more, e.g., by at least about 60%, at least about 70%, at least about 80%, or at least about 90%.

[0244] In some embodiments, a subject assay method involves contacting an assay mixture with a test agent, wherein the assay mixture includes a G6S-related domain or G6S-related domain containing polypeptide, as described above; and a substrate for the sulfatase, e.g., a heparan sulfate molecule or a heparin molecule. The effect, if any, of the test agent on the ability of the G6S-related domain or G6S-related domain containing polypeptide to bind to heparan sulfate is determined using a variety of assay formats. For example, a binding assay in which the G6S-related domain or G6S-related domain containing polypeptide is labeled, or in which the heparan sulfate is detectably labeled, is used. The G6S-related domain or G6S-related domain containing polypeptide, in the absence of the test agent, forms a complex with the heparan sulfate. In the presence of a test agent that reduces substrate recognition, the amount of complex formed is reduced. The amount of complex formed is determined using an assay appropriate to the detectable label attached to the detectably labeled member of the complex.

[0245] The amount of complex formed is determined using an assay appropriate to the detectable label attached to the detectably labeled member of the complex. Suitable assay formats include immunoprecipitation, Western blotting, enzyme-linked immunosorbent assays (ELISA), and the like.

[0246] In some embodiments, the heparan sulfate is immobilized on an insoluble support, and the G6S-related domain or G6S-related domain containing polypeptide is detectably labeled. Binding is assessed by detecting the detectable label bound to the immobilized heparan sulfate. In other embodiments, the G6S-related domain or G6S-related domain containing polypeptide is immobilized on an insoluble support, and the heparan sulfate is detectably labeled. Binding is assessed by detecting the detectable label bound to the immobilized G6S-related domain or G6S-related domain containing polypeptide.

[0247] A heparan sulfate or a G6S-related domain or G6S-related domain containing polypeptide can be immobilized directly to an insoluble support, or can be immobilized via a linker or via an antibody that is immobilized on the insoluble support. The detectable label can be a direct detectable label, or an indirect detectable label (e.g., a detectably labeled antibody). Insoluble supports include beads; plastic (e.g., 96-well plates); membranes (e.g., polyvinylpyrollidone, nylon, nitrocellulose, etc.); and the like.

[0248] Methods for Identifying an Agent that Reduces Binding of a Coiled-Coil Domain of a Subject Sulfatase with a Second Protein

[0249] The present invention further provides a method for identifying an agent that reduces coiled-coil domain binding of a subject sulfatase with a second protein. The second protein may be a second sulfatase polypeptide, or another, non-sulfatase protein.

[0250] Polypeptides that are suitable for use in the instant methods include a full-length subject sulfatase polypeptide; a fragment of a subject sulfatase that includes a coiled-coil domain; a fusion polypeptide that includes a coiled-coil domain of a subject sulfatase and a heterologous polypeptide fused in-frame; a coiled-coil domain of a subject sulfatase.

[0251] Agents of interest include those that reduce binding of a coiled-coil domain of a subject sulfatase to a second protein (a binding partner) by at least about 10%, at least about 20%, at least about 30%, at least about 40%, at least about 50%, or more, e.g., by at least about 60%, at least about 70%, at least about 80%, or at least about 90%.

[0252] Suitable assays for detecting binding of a coiled-coil domain of a subject sulfatase with a second protein include, but are not limited to, a fluorescence resonance energy transfer (FRET) assay; a bioluminescence resonance energy transfer (BRET) assay; a fluorescence quenching assay; a fluorescence anisotropy assay; an immunological assay; and an assay involving binding of a detectably labeled protein to an immobilized protein.

[0253] In some embodiments, a subject assay method involves contacting an assay mixture with a test agent, wherein the assay mixture includes a coiled-coil domain or coiled-coil domain containing polypeptide, as described above; and a binding partner for the sulfatase, e.g., a second protein that binds the coiled-coil domain. The effect, if any, of the test agent on the ability of the coiled-coil domain or coiled-coil domain containing polypeptide to bind to the second protein is determined using a variety of assay formats. For example, a binding assay in which the coiled-coil domain or coiled-coil domain containing polypeptide is labeled, or in which the second protein is detectably labeled, is used. The coiled-coil domain or coiled-coil domain containing polypeptide, in the absence of the test agent, forms a complex with the binding partner e.g., the second protein). In the presence of a test agent that reduces substrate recognition, the amount of complex formed is reduced. The amount of complex formed is determined using an assay appropriate to the detectable label attached to the detectably labeled member of the complex. Suitable assay formats include immunoprecipitation, Western blotting, enzyme-linked immunosorbent assays (ELISA), and the like.

[0254] In some embodiments, the binding partner is immobilized on an insoluble support, and the coiled-coil domain or coiled-coil domain-containing polypeptide is detectably labeled. Binding is assessed by detecting the detectable label bound to the immobilized binding partner. In other embodiments, the coiled-coil domain or coiled-coil domain-containing polypeptide is immobilized on an insoluble support, and the binding partner is detectably labeled. Binding is assessed by detecting the detectable label bound to the immobilized coiled-coil domain or coiled-coil domain-containing polypeptide.

[0255] A binding partner or a coiled-coil protein can be immobilized directly to an insoluble support, or can be immobilized via a linker or via an antibody that is immobilized on the insoluble support. The detectable label can be a direct detectable label, or an indirect detectable label (e.g., a detectably labeled antibody). Insoluble supports include beads; plastic (e.g., 96-well plates); membranes (e.g., polyvinylpyrollidone, nylon, nitrocellulose, etc.); and the like.

[0256] FRET involves the transfer of energy from a donor fluorophore in an excited state to a nearby acceptor fluorophore. For this transfer to take place, the donor and acceptor molecules must in close proximity (e.g., less than 10 nanometers apart, usually between 10 and 100 Åapart), and the emission spectra of the donor fluorophore must overlap the excitation spectra of the acceptor fluorophore. In these embodiments, a fluorescently labeled coiled-coil domain or coiled-coil domain-containing protein serves as a donor and/or acceptor in combination with a second fluorescent protein or dye, e.g., a fluorescent protein as described in Matz et al., Nature Biotechnology (October 1999) 17:969-973; a green fluorescent protein (GFP), including a “humanized” GFP; a GFP from Aequoria victoria or fluorescent mutant thereof, e.g., as described in U.S. Pat. Nos. 6,066,476; 6,020,192; 5,985,577; 5,976,796; 5,968,750; 5,968,738; 5,958,713; 5,919,445; 5,874,304, the disclosures of which are herein incorporated by reference; a GFP from another species such as Renilla reniformis, Renilla mulleri, or Ptilosarcus guernyi, as described in, e.g., WO 99/49019 and Peelle et al. (2001) J. Protein Chem. 20:507-519; “humanized” recombinant GFP (hrGFP) (Stratagene); other fluorescent dyes, e.g., coumarin and its derivatives, e.g. 7-amino-4-methylcoumarin, aminocoumarin, bodipy dyes, such as Bodipy FL, cascade blue, fluorescein and its derivatives, e.g. fluorescein isothiocyanate, Oregon green, rhodamine dyes, e.g. texas red, tetramethylrhodamine, eosins and erythrosins, cyanine dyes, e.g. Cy3 and Cy5, macrocyclic chelates of lanthanide ions, e.g. quantum dye, etc., chemilumescent dyes, e.g., luciferases.

[0257] BRET is a protein-protein interaction assay based on energy transfer from a bioluminescent donor to a fluorescent acceptor protein. The BRET signal is measured by the amount of light emitted by the acceptor to the amount of light emitted by the donor. The ratio of these two values increases as the two proteins are brought into proximity. The BRET assay has been amply described in the literature. See, e.g., U.S. Pat. Nos. 6,020,192; 5,968,750; and 5,874,304; and Xu et al. (1999) Proc. Natl. Acad. Sci. USA 96:151-156. BRET assays may be performed by analyzing transfer between a bioluminescent donor protein and a fluorescent acceptor protein. Interaction between the donor and acceptor proteins can be monitored by a change in the ratio of light emitted by the bioluminescent and fluorescent proteins. In this application, the coiled-coil domain or coiled-coil domain-containing protein serves as donor and/or acceptor protein.

[0258] Where the second protein is at least a second sulfatase protein, the effect of the test agent sulfatase. As used herein, the term “multimerization” refers to formation of dimers, trimers, tetramers, and higher multimers of a subject sulfatase. Whether a subject sulfatase forms a complex with one or more additional subject sulfatase molecules can be determined using any known assay, including assays as described above for interacting proteins. Formation of multimers can also be detected using non-denaturing gel electrophoresis, where multimerized subject sulfatase migrates more slowly than monomeric subject sulfatase. Formation of multimers can also be detected using fluorescence quenching techniques.

[0259] Formation of multimers can also be detected by analytical ultracentrifugation, for example through glycerol or sucrose gradients, and subsequent visualization of subject sulfatase in gradient fractions by Western blotting or staining of SDS-polyacrylamide gels. Multimers are expected to sediment at defined positions in such gradients. Formation of multimers can also be detected using analytical gel filtration, e.g. in HPLC or FPLC systems, e.g. on columns such as Superdex 200 (Pharmacia Amersham Inc.). Multimers run at defined positions on these columns, and fractions can be analyzed as above. The columns allow one to relate the number and position of peaks directly to the multimerization status of the protein.

[0260] Agents

[0261] The invention further provides agents, including agents identified using a screening assay of the invention, and compositions comprising the agents, including pharmaceutical compositions. As used herein, the term “agent” refers to a substance that modulates a level of enzymatically active subject sulfatase. In some embodiments, an agent is one identified by a screening assay of the invention. “Modulating a level of enzymatically active subject sulfatase” includes increasing or decreasing enzymatic activity of a subject sulfatase; increasing or decreasing substrate recognition by a subject sulfatase; increasing or decreasing binding of a coiled-coil domain of a subject sulfatase to a second protein; reducing furin-mediated processing of a subject sulfatase; increasing or decreasing a level of enzymatically active sulfatase protein; and increasing or decreasing a level of mRNA encoding enzymatically active subject sulfatase. In some embodiments, an agent is a subject sulfatase, where the subject sulfatase itself is administered to an individual. In some embodiments, an agent is an antibody specific for a subject sulfatase.

[0262] The subject compositions can be formulated using well-known reagents and methods. In some embodiments, compositions are provided in formulation with a pharmaceutically acceptable excipient(s). A wide variety of pharmaceutically acceptable excipients are known in the art and need not be discussed in detail herein. Pharmaceutically acceptable excipients have been amply described in a variety of publications, including, for example, A. Gennaro (2000) “Remington: The Science and Practice of Pharmacy,” 20th edition, Lippincott, Williams, & Wilkins; Pharmaceutical Dosage Forms and Drug Delivery Systems (1999) H. C. Ansel et al., eds., 7^{th} ed., Lippincott, Williams, & Wilkins; and Handbook of Pharmaceutical Excipients (2000) A. H. Kibbe et al., eds., 3^{rd} ed. Amer. Pharmaceutical Assoc.

[0263] The pharmaceutically acceptable excipients, such as vehicles, adjuvants, carriers or diluents, are readily available to the public. Moreover, pharmaceutically acceptable auxiliary substances, such as pH adjusting and buffering agents, tonicity adjusting agents, stabilizers, wetting agents and the like, are readily available to the public.

[0264] In many embodiments, an active agent is a small molecule, e.g., a small organic or inorganic compound having a molecular weight of more than 50 and less than about 2,500 daltons. Agents may comprise functional groups necessary for structural interaction with proteins, particularly hydrogen bonding, and may include at least an amine, carbonyl, hydroxyl or carboxyl group, and may contain at least two of the functional chemical groups. The agents may comprise cyclical carbon or heterocyclic structures and/or aromatic or polyaromatic structures substituted with one or more of the above functional groups. Agents are also found among biomolecules including peptides, saccharides, fatty acids, steroids, purines, pyrimidines, derivatives, structural analogs or combinations thereof.

[0265] In some embodiments, an active agent is a peptide. Suitable peptides include peptides of from about 3 amino acids to about 50, from about 5 to about 30, or from about 10 to about 25 amino acids in length. In some embodiments, a peptide exhibits one or more of the following activities: inhibits binding of a coiled-coil domain of a subject sulfatase to an interacting protein; inhibits enzymatic activity of a subject sulfatase molecule; inhibits substrate recognition, mediated by the G6S-related domain of a subject sulfatase; inhibits furin-mediated proteolytic processing of a subject sulfatase. In some embodiments, a peptide has a sequence of from about 3 amino acids to about 50, from about 5 to about 30, or from about 10 to about 25 amino acids of a naturally-occurring subject sulfatase protein.

[0266] Peptides can include naturally-occurring and non-naturally occurring amino acids. Peptides may comprise D-amino acids, a combination of D- and L-amino acids, and various “designer” amino acids (e.g., β-methyl amino acids, Cα-methyl amino acids, and Nα-methyl amino acids, etc.) to convey special properties to peptides. Additionally, peptide may be a cyclic peptide. Peptides may include non-classical amino acids in order to introduce particular conformational motifs. Any known non-classical amino acid can be used. Non-classical amino acids include, but are not limited to, 1,2,3,4-tetrahydroisoquinoline-3-carboxylate; (2S,3S)-methylphenylalanine, (2S,3R)-methylphenylalanine, (2R,3S)-methyl-phenylalanine and (2R,3R)-methyl-phenylalanine; 2-aminotetrahydronaphthalene-2-carboxylic acid; hydroxy-1,2,3,4-tetrahydroisoquinoline-3-carboxylate; β-carboline (D and L); HIC (histidine isoquinoline carboxylic acid); and HIC (histidine cyclic urea). Amino acid analogs and peptidomimetics may be incorporated into a peptide to induce or favor specific secondary structures, including, but not limited to, LL-Acp (LL-3-amino-2-propenidone-6-carboxylic acid), a β-turn inducing dipeptide analog; 62 -sheet inducing analogs; β-turn inducing analogs; α-helix inducing analogs; γ-turn inducing analogs; Gly-Ala turn analog; amide bond isostere; tretrazol; and the like.

[0267] A peptide may be a depsipeptide, which may be a linear or a cyclic depsipeptide. Kuisle et al. (1999) Tet. Letters 40:1203-1206. “Depsipeptides” are compounds containing a sequence of at least two alpha-amino acids and at least one alpha-hydroxy carboxylic acid, which are bound through at least one normal peptide link and ester links, derived from the hydroxy carboxylic acids, where “linear depsipeptides” may comprise rings formed through S—S bridges, or through an hydroxy or a mercapto group of an hydroxy-, or mercapto-amino acid and the carboxyl group of another amino- or hydroxy-acid but do not comprise rings formed only through peptide or ester links derived from hydroxy carboxylic acids. “Cyclic depsipeptides” are peptides containing at least one ring formed only through peptide or ester links, derived from hydroxy carboxylic acids.

[0268] Peptides may be cyclic or bicyclic. For example, the C-terminal carboxyl group or a C-terminal ester can be induced to cyclize by internal displacement of the —OH or the ester (—OR) of the carboxyl group or ester respectively with the N-terminal amino group to form a cyclic peptide. For example, after synthesis and cleavage to give the peptide acid, the free acid is converted to an activated ester by an appropriate carboxyl group activator such as dicyclohexylcarbodiimide (DCC) in solution, for example, in methylene chloride (CH₂Cl₂), dimethyl formamide (DMF) mixtures. The cyclic peptide is then formed by internal displacement of the activated ester with the N-terminal amine. Internal cyclization as opposed to polymerization can be enhanced by use of very dilute solutions. Methods for making cyclic peptides are well known in the art

[0269] The term “bicyclic” refers to a peptide in which there exists two ring closures. The ring closures are formed by covalent linkages between amino acids in the peptide. A covalent linkage between two nonadjacent amino acids constitutes a ring closure, as does a second covalent linkage between a pair of adjacent amino acids which are already linked by a covalent peptide linkage. The covalent linkages forming the ring closures may be amide linkages, i.e., the linkage formed between a free amino on one amino acid and a free carboxyl of a second amino acid, or linkages formed between the side chains or “R” groups of amino acids in the peptides. Thus, bicyclic peptides may be “true” bicyclic peptides, i.e., peptides cyclized by the formation of a peptide bond between the N-terminus and the C-terminus of the peptide, or they may be “depsi-bicyclic” peptides, i.e., peptides in which the terminal amino acids are covalently linked through their side chain moieties.

[0270] A desamino or descarboxy residue can be incorporated at the terminii of the peptide, so that there is no terminal amino or carboxyl group, to decrease susceptibility to proteases or to restrict the conformation of the peptide. C-terminal functional groups include amide, amide lower alkyl, amide di(lower alkyl), lower alkoxy, hydroxy, and carboxy, and the lower ester derivatives thereof, and the pharmaceutically acceptable salts thereof.

[0271] In addition to the foregoing N-terminal and C-terminal modifications, a peptide or peptidomimetic can be modified with or covalently coupled to one or more of a variety of hydrophilic polymers to increase solubility and circulation half-life of the peptide. Suitable nonproteinaceous hydrophilic polymers for coupling to a peptide include, but are not limited to, polyalkylethers as exemplified by polyethylene glycol and polypropylene glycol, polylactic acid, polyglycolic acid, polyoxyalkenes, polyvinylalcohol, polyvinylpyrrolidone, cellulose and cellulose derivatives, dextran and dextran derivatives, etc. Generally, such hydrophilic polymers have an average molecular weight ranging from about 500 to about 100,000 daltons, from about 2,000 to about 40,000 daltons, or from about 5,000 to about 20,000 daltons. The peptide can be derivatized with or coupled to such polymers using any of the methods set forth in Zallipsky, S., Bioconjugate Chem., 6:150-165 (1995); Monfardini, C, et al., Bioconjugate Chem., 6:62-69 (1995); U.S. Pat. Nos. 4,640,835; 4,496,689; 4,301,144; 4,670,417; 4,791,192; 4,179,337 or WO 95/34326.

[0272] Another suitable agent for reducing an activity of a subject sulfatase is a peptide aptamer. Peptide aptamers are peptides or small polypeptides that act as dominant inhibitors of protein function. Peptide aptamers specifically bind to target proteins, blocking their function ability. Kolonin and Finley, PNAS (1998) 95:14266-14271. Due to the highly selective nature of peptide aptamers, they may be used not only to target a specific protein, but also to target specific functions of a given protein (e.g. a signaling function). Further, peptide aptamers may be expressed in a controlled fashion by use of promoters which regulate expression in a temporal, spatial or inducible manner. Peptide aptamers act dominantly; therefore, they can be used to analyze proteins for which loss-of-function mutants are not available.

[0273] Peptide aptamers that bind with high affinity and specificity to a target protein may be isolated by a variety of techniques known in the art. Peptide aptamers can be isolated from random peptide libraries by yeast two-hybrid screens (Xu et al., PNAS (1997) 94:12473-12478). They can also be isolated from phage libraries (Hoogenboom et al., Immunotechnology (1998) 4:1-20) or chemically generated peptides/libraries.

[0274] Intracellularly expressed antibodies, or intrabodies, are single-chain antibody molecules designed to specifically bind and inactivate target molecules inside cells. Intrabodies have been used in cell assays and in whole organisms. Chen et al., Hum. Gen. Ther. (1994) 5:595-601; Hassanzadeh et al., Febs Lett. (1998) 16(1, 2):75-80 and 81-86. Inducible expression vectors can be constructed with intrabodies that react specifically with subject sulfatase protein. These vectors can be introduced into model organisms and studied in the same manner as described above for aptamers.

[0275] In some embodiments, the active agent is an antibody specific for a subject sulfatase, or a domain or epitope of a subject sulfatase. For example, an active agent includes an antibody that is specific for a coiled-coil domain of a subject sulfatase, which antibody reduces binding of a subject sulfatase to a second protein. As another example, an active agent is an antibody that binds a G6-related domain, or epitope thereof, of a subject sulfatase, which antibody reduces substrate recognition by the subject sulfatase.

[0276] In some of the invention, the active agent is an agent that modulates, and generally decreases or down regulates, the expression of the gene encoding a subject sulfatase in the host. Such agents include, but are not limited to, antisense RNA, interfering RNA, ribozymes, and the like, as described below.

[0277] The invention further provides methods for reducing a sulfatase activity of a subject sulfatase; methods of reducing substrate recognition by a subject sulfatase; methods of reducing binding of a coiled-coil domain of a subject sulfatase to a second protein (e.g., where the second protein is a sulfatase polypeptide, or a non-sulfatase polypeptide); and methods of reducing furin-mediated proteolytic cleavage of a subject sulfatase. The methods generally involve contacting a subject sulfatase (either in vitro or in vivo) with an appropriate agent, as described herein.

[0278] Nucleic Acid and Polypeptide Therapeutic Compositions

[0279] The nucleic acid compositions and polypeptide compositions of the subject invention also find use as therapeutic agents in situations where one wishes to enhance sulfatase activity in a host, particularly the activity of the subject polypeptides, or to provide sulfatase activity at a particular anatomical site.

[0280] In some embodiments, a subject sulfatase is provided in a pharmaceutical composition with a pharmaceutically acceptable excipient. Pharmaceutically acceptable excipients have been amply described in a variety of publications, including, for example, A. Gennaro (2000) “Remington: The Science and Practice of Pharmacy,” 20th edition, Lippincott, Williams, & Wilkins; Pharmaceutical Dosage Forms and Drug Delivery Systems (1999) H. C. Ansel et al., eds., 7^{th} ed., Lippincott, Williams, & Wilkins; and Handbook of Pharmaceutical Excipients (2000) A. H. Kibbe et al., eds., 3^{rd} ed. Amer. Pharmaceutical Assoc.

[0281] The pharmaceutically acceptable excipients, such as vehicles, adjuvants, carriers or diluents, are readily available to the public. Moreover, pharmaceutically acceptable auxiliary substances, such as pH adjusting and buffering agents, tonicity adjusting agents, stabilizers, wetting agents and the like, are readily available to the public.

[0282] The subject genes, gene fragments, or the encoded proteins or protein fragments are useful in therapy to treat disorders associated with an activity of a subject sulfatase. Expression vectors may be used to introduce the gene into a cell. Such vectors generally have convenient restriction sites located near the promoter sequence to provide for the insertion of nucleic acid sequences. Transcription cassettes may be prepared comprising a transcription initiation region, the target gene or fragment thereof, and a transcriptional termination region. The transcription cassettes may be introduced into a variety of vectors, e.g. plasmid; retrovirus, e.g. lentivirus; adenovirus; and the like, where the vectors are able to transiently or stably be maintained in the cells, usually for a period of at least about one day, more usually for a period of at least about several days to several weeks.

[0283] The gene or protein may be introduced into tissues or host cells by any number of routes, including viral infection, microinjection, or fusion of vesicles. Jet injection may also be used for intramuscular administration, as described by Furth et al. (1992), Anal Biochem 205:365-368. The DNA may be coated onto gold microparticles, and delivered intradermally by a particle bombardment device, or “gene gun” as described in the literature (see, for example, Tang et al. (1992), Nature 356:152-154), where gold microprojectiles are coated with the DNA, then bombarded into skin cells.

[0284] In yet other embodiments of the invention, the active agent is an agent that modulates, and generally decreases or down regulates, the expression of the gene encoding the target protein in the host. For example, antisense molecules can be used to down-regulate expression of the subject genes in cells. The anti-sense reagent may be antisense oligonucleotides (ODN), particularly synthetic ODN having chemical modifications from native nucleic acids, or nucleic acid constructs that express such anti-sense molecules as RNA. The antisense sequence is complementary to the mRNA of the targeted gene, and inhibits expression of the targeted gene products. Antisense molecules inhibit gene expression through various mechanisms, e.g. by reducing the amount of mRNA available for translation, through activation of RNAse H, or steric hindrance. One or a combination of antisense molecules may be administered, where a combination may comprise multiple different sequences.

[0285] Antisense molecules may be produced by expression of all or a part of the target gene sequence in an appropriate vector, where the transcriptional initiation is oriented such that an antisense strand is produced as an RNA molecule. Alternatively, the antisense molecule is a synthetic oligonucleotide. Antisense oligonucleotides will generally be at least about 7, usually at least about 12, more usually at least about 20 nucleotides in length, and not more than about 500, usually not more than about 50, more usually not more than about 35 nucleotides in length, where the length is governed by efficiency of inhibition, specificity, including absence of cross-reactivity, and the like. It has been found that short oligonucleotides, of from 7 to 8 bases in length, can be strong and selective inhibitors of gene expression (see Wagner et al. (1996), Nature Biotechnol. 14:840-844).

[0286] A specific region or regions of the endogenous sense strand mRNA sequence is chosen to be complemented by the antisense sequence. Selection of a specific sequence for the oligonucleotide may use an empirical method, where several candidate sequences are assayed for inhibition of expression of the target gene in an in vitro or animal model. A combination of sequences may also be used, where several regions of the mRNA sequence are selected for antisense complementation.

[0287] Antisense oligonucleotides may be chemically synthesized by methods known in the art (see Wagner et al. (1993), supra, and Milligan et al., supra.) Preferred oligonucleotides are chemically modified from the native phosphodiester structure, in order to increase their intracellular stability and binding affinity. A number of such modifications have been described in the literature, which modifications alter the chemistry of the backbone, sugars or heterocyclic bases.

[0288] Among useful changes in the backbone chemistry are phosphorothioates; phosphorodithioates, where both of the non-bridging oxygens are substituted with sulfur; phosphoroamidites; alkyl phosphotriesters and boranophosphates. Achiral phosphate derivatives include 3′-O′-5′-S-phosphorothioate, 3′-S-5′-O-phosphorothioate, 3′-CH2-5′-O-phosphonate and 3′-NH-5′-O-phosphoroamidate. Peptide nucleic acids replace the entire ribose phosphodiester backbone with a peptide linkage. Sugar modifications are also used to enhance stability and affinity. The β-anomer of deoxyribose may be used, where the base is inverted with respect to the natural α-anomer. The 2′-OH of the ribose sugar may be altered to form 2′-O-methyl or 2′-O-allyl sugars, which provides resistance to degradation without comprising affinity. Modification of the heterocyclic bases must maintain proper base pairing. Some useful substitutions include deoxyuridine for deoxythymidine; 5-methyl-2′-deoxycytidine and 5-bromo-2′-deoxycytidine for deoxycytidine. 5-propynyl-2′-deoxyuridine and 5-propynyl-2′-deoxycytidine have been shown to increase affinity and biological activity when substituted for deoxythymidine and deoxycytidine, respectively.

[0289] As an alternative to anti-sense inhibitors, catalytic nucleic acid compounds, e.g. ribozymes, anti-sense conjugates, etc. may be used to inhibit gene expression. Ribozymes may be synthesized in vitro and administered to the patient, or may be encoded on an expression vector, from which the ribozyme is synthesized in the targeted cell (for example, see International patent application WO 9523225, and Beigelman et al (1995), Nucl. Acids Res. 23:4434-42). Examples of oligonucleotides with catalytic activity are described in WO 9506764. Conjugates of anti-sense ODN with a metal complex, e.g. terpyridylCu(II), capable of mediating mRNA hydrolysis are described in Bashkin et al. (1995), Appl. Biochem. Biotechnol. 54:43-56.

[0290] In some embodiments, the active agent is an interfering RNA (RNAi). RNAi includes double-stranded RNA interference (dsRNAi). Use of RNAi to reduce a level of a particular mRNA and/or protein is based on the interfering properties of double-stranded RNA derived from the coding regions of gene. In one example of this method, complementary sense and antisense RNAs derived from a substantial portion of the subject sulfatase gene are synthesized in vitro. The resulting sense and antisense RNAs are annealed in an injection buffer, and the double-stranded RNA injected or otherwise introduced into the subject (such as in their food or by soaking in the buffer containing the RNA). See, e.g., WO99/32619. In another embodiment, dsRNA derived from a subject sulfatase gene is generated in vivo by simultaneous expression of both sense and antisense RNA from appropriately positioned promoters operably linked to a subject sulfatase coding sequences in both sense and antisense orientations.

[0291] Therapeutic Methods

[0292] The instant invention provides various therapeutic methods. In some embodiments, methods of regulating, including modulating and inhibiting, enzymatic activity of the subject proteins are provided. The subject methods find use in the treatment of a variety of different disease conditions, including, but not limited to, cancer; inflammation; disorders amenable to treatment by increasing angiogenesis, such as ischemic disorders; and thrombosis.

[0293] The host, or patient, may be from any mammalian species, e.g. primate sp., particularly humans; rodents, including mice, rats and hamsters; rabbits; equines, bovines, canines, felines; etc. Animal models are of interest for experimental investigations, providing a model for treatment of human disease.

[0294] As used herein, the term “agent” refers to a substance that modulates a level of enzymatically active subject sulfatase. In some embodiments, an agent is one identified by a screening assay of the invention. “Modulating a level of enzymatically active subject sulfatase” includes increasing or decreasing enzymatic activity of a subject sulfatase; increasing or decreasing substrate recognition by a subject sulfatase; increasing or decreasing binding of a coiled-coil domain of a subject sulfatase to a second protein; reducing furin-mediated processing of a subject sulfatase; increasing or decreasing a level of enzymatically active sulfatase protein; and increasing or decreasing a level of mRNA encoding enzymatically active subject sulfatase. In some embodiments, an agent is a subject sulfatase, where the subject sulfatase itself is administered to an individual. In some embodiments, an agent is an antibody specific for a subject sulfatase.

[0295] Methods of Reducing Tumor Growth

[0296] Disease conditions amenable to treatment by reducing an activity of a subject sulfatase and/or reducing a level of a subject sulfatase polypeptide or mRNA include those disease conditions associated with or resulting from the promotion of angiogenesis by a tumor. Thus, the subject methods are useful for reducing tumor-induced angiogenesis. In some embodiments, methods are provided for treating cancer. In some of these embodiments, methods are provided for reducing tumor growth. In other embodiments, methods are provided for reducing release of differentiation factors from the ECM.

[0297] Methods of reducing tumor growth, methods of reducing tumor-induced angiogenesis, and methods of reducing subject sulfatase activity, generally comprise administering to an individual an agent that reduces a level of enzymatically active subject sulfatase. An effective amount of an agent reduces the level of enzymatically active sulfatase by at least about 10%, at least about 20%, at least about 30%, at least about 40%, at least about 50%, or more, when compared to a suitable control. An effective amount of an agent reduces tumor growth by at least about 10%, at least about 20%, at least about 30%, at least about 40%, at least about 50%, or more, when compared to a suitable control.

[0298] Methods of reducing release of factors, such as growth factors and differentiation factors, from ECM are provided. The methods generally comprise administering to an individual an effective amount of an agent that reduces a level of enzymatically active subject sulfatase, where a reduction in the level of enzymatically active sulfatase results in a reduction of release of factor from the ECM adjacent to or surrounding the tumor.

[0299] Differentiation and growth factors include, but are not limited to, a fibroblast growth factor (FGF), a heparin-binding EGF-like growth factor, a hepatocyte growth factor, a member of the Wnt family of secreted glycoproteins, vascular endothelial growth factor (VEGF), platelet-derived growth factor (PDGF), a transforming growth factor (TGF), e.g., TGF-β, a bone morphogenetic protein, GM-CSF, and hepatocyte growth factor. In some embodiments, a factor released from the ECM by a subject sulfatase is a factor that binds heparan sulfate. In some embodiments, a factor released from the ECM by a subject sulfatase is an angiogenic factor.

[0300] Tumors which may be treated using the methods of the instant invention include carcinomas, e.g. colon, prostate, breast, melanoma, ductal, endometrial, stomach, pancreactic, mesothelioma, dysplastic oral mucosa, invasive oral cancer, non-small cell lung carcinoma, transitional and squamous cell urinary carcinoma, etc.; neurological malignancies, e.g. neuroblastoma, glioblastoma, astrocytoma, gliomas, etc.; hematological malignancies, e.g. childhood acute leukaemia, non-Hodgkin's lymphomas, chronic lymphocytic leukaemia, malignant cutaneous T-cells, mycosis fungoides, non-MF cutaneous T-cell lymphoma, lymphomatoid papulosis, T-cell rich cutaneous lymphoid hyperplasia, bullous pemphigoid, discoid lupus erythematosus, lichen planus, etc.; and the like.

[0301] Whether tumor cell growth is inhibited or reduced can be assessed by any means known in the art, including, but not limited to, measuring tumor size; determining whether tumor cells are proliferating, e.g., by using a ³H-incorporation assay; and/or counting tumor cells.

[0302] Methods for Reducing Inflammation

[0303] In some embodiments, the invention provides methods of reducing inflammation, comprising increasing a level of enzymatically active subject sulfatase. Sulfatases act to remove a sulfate group from carbohydrate moieties of selectin ligands. Once a sulfate group is removed from the selectin ligand (e.g. from N-acetylglucosamine 6-sulfate), binding of the selectin to the ligand is reduced, and binding between an immune cell which a selectin on its surface to an selectin ligand on, e.g., the surface of an endothelial cell, is reduced. Accordingly, removal of a sulfate group from a selectin ligand reduces inflammation. In some embodiments, the methods comprise administering a subject sulfatase to an individual. In other embodiments, the methods comprise administering an agent (e.g., an agent identified by a screening method described above) to an individual, wherein said agent is one that increases a level of enzymatically active subject sulfatase in the individual. A therapeutically effective amount an agent is an amount sufficient to remove sulfate moieties from a substantial proportional number of ligands so that inflammation can either be prevented or ameliorated. Thus, “treating” as used herein in the context of inflammation shall mean preventing or ameliorating inflammation and/or symptoms associated with inflammation.

[0304] In determining the dose of sulfatases or agents to be administered, it must be kept in mind that one does not wish to completely remove all sulfates. In order for a normal healing process to proceed, at least some of the white blood cells or neutrophils must be brought into the tissue in the areas where the wound, infection or disease state is occurring. The amount of the sulfatases or agent administered is adjusted based on the particular needs of the patient while taking into consideration a variety of factors such as the type of disease that is being treated.

[0305] The subject sulfatases and/or agents are useful to treat a wide range of diseases, including diseases such as rheumatoid arthritis, asthma, adult respiratory distress syndrome, sarcoidosis, hypersensitivity pneumonitis multiple sclerosis, allograft rejection, and the spread of lymphomas to cutaneous sites. The compositions of the invention should be applicable to treat any disease state wherein the immune system turns against the body causing the white cells to accumulate in the tissues to the extent that they cause tissue damage, swelling, inflammation and/or pain. The inflammation of rheumatoid arthritis, for example, is created when large numbers of white blood cells quickly enter the joints in the area of disease and attack the surrounding tissues.

[0306] Formulations of sulfatases and/or agent are administered to prevent the undesirable aftereffects of tissue damage resulting from heart attacks. When a heart attack occurs and the patient has been revived, such as by the application of anticoagulants or thrombolytic (e.g., tPA), the endothelial lining where a clot was formed has often suffered damage. When the antithrombotic has removed the clot, the damaged tissue beneath the clot and other damaged tissue in the endothelial lining which has been deprived of oxygen become activated. The white blood cells possess L-selectin. The receptors adhere to ligand molecules on the surface of activated endothelial cells. The ligand molecules may be induced to the surface of the endothelial cells by activation. Large numbers of white blood cells are quickly captured and brought into the tissue surrounding the affected area, resulting in inflammation, swelling and necrosis which thereby decreases the likelihood of survival of the patient.

[0307] In addition to treating patients suffering from the trauma resulting from heart attack, patients suffering from actual physical trauma could be treated with formulations of the invention in order to relieve the amount of inflammation and swelling which normally result after an area of the body is subjected to severe trauma. This is most preferably done by local injection of sulfatases and/or agent to the area subjected to trauma. Also, patients suffering from hemorrhagic shock could be treated to alleviate inflammation associated with restoring blood flow. Other disease states which might be treatable using formulations of the invention include various types of arthritis, various chronic inflammatory conditions of the skin, insulin-dependent diabetes, and adult respiratory distress syndrome. After reading the present disclosure, those skilled in the art will recognize other disease states and/or symptoms which might be treated and/or mitigated by the administration of formulations of the present invention.

[0308] Methods of Increasing Angiogenesis

[0309] In some embodiments, the invention provides methods for increasing angiogenesis. The methods generally involve administering to a mammal having a condition amenable to treatment by increasing angiogenesis an effective amount of a subject sulfatase. In many embodiments, the subject sulfatase will be administered locally to an anatomical site.

[0310] Examples of conditions and diseases amenable to treatment according to the method of the invention include any condition associated with an obstruction of a blood vessel, e.g., obstruction of an artery, vein, or of a capillary system. Specific examples of such conditions or disease include, but are not necessarily limited to, coronary occlusive disease, carotid occlusive disease, arterial occlusive disease, peripheral arterial disease, atherosclerosis, myointimal hyperplasia (e.g., due to vascular surgery or balloon angioplasty or vascular stenting), thromboangiitis obliterans, thrombotic disorders, vasculitis, and the like. Examples of conditions or diseases that can be prevented using the methods of the invention include, but are not necessarily limited to, any of a variety of ischemic conditions (e.g., myocardial ischemia, limb ischemia, ischemia associated with stroke), heart attack (myocardial infarction) or other vascular death, stroke, death or loss of limbs associated with decreased blood flow, and the like.

[0311] Thus, the invention provides methods of treating an ischemic condition. Administration of an effective amount of a subject sulfatase results in an increase in angiogenesis, and as a result, an increased blood supply to an ischemic tissue. Following administration of a subject sulfatase, blood supply (blood flow) to the ischemic tissue is increased by at least about 10%, at least about 20%, at least about 30%, at least about 50%, at least about 75%, or at least about 100%, or more when compared to a suitable control. Whether the blood supply to an ischemic tissue is increased can be measured by any method known in the art, including, but not limited to, thermography; infrared recorder; transcutaneous PO₂, transcutaneous PCO₂, laser Doppler, Doppler waveform, ankle brachial index, pulse volume recording, toe pressure, duplex waveform, magnetic resonance imaging profile, isotope washout, and NAD/NADH fluorometry. Such methods are well known in the art and have been described in numerous publications, including, e.g., Lazarus et al. ((1994) Arch. Dermatol. 130:491) and references cited therein.

[0312] Whether angiogenesis is increased can be determined using any known assay. Whether angiogenesis is increased can be determined using any method known in the art, including, e.g., stimulation of neovascularization into implants impregnated with relaxin; stimulation of blood vessel growth in the cornea or anterior eye chamber; stimulation of endothelial cell proliferation, migration or tube formation in vitro; and the chick chorioallantoic membrane assay; the hamster cheek pouch assay; the polyvinyl alcohol sponge disk assay. Such assays are well known in the art and have been described in numerous publications, including, e.g., Auerbach et al. ((1991) Pharmac. Ther. 51:1-11), and references cited therein.

[0313] Methods of Reducing Thrombosis

[0314] The invention further provides methods of reducing thrombosis in an individual, the methods generally involving administering an effective amount of an inhibitor of a subject sulfatase. In some embodiments, the inhibitor is a small molecule inhibitor of sulfatase activity of a subject sulfatase. In other embodiments, the inhibitor is an antibody specific for a subject sulfatase, which antibody inhibits the sulfatase activity, either directly or by effecting removal of the sulfatase.

[0315] Formulations, Dosages, and Routes of Administration

[0316] As mentioned above, an effective amount of the active agent (e.g., small molecule, anti-sulfatase antibody, or a subject sulfatase) is administered to the host, where “effective amount” means a dosage sufficient to produce a desired result. In some embodiments, the desired result is at least a reduction in enzymatic activity of a subject sulfatase as compared to a control. In other embodiments, the desired result is an increase in the level of enzymatically active sulfatase (in the individual, or in a localized anatomical site in the individual), as compared to a control.

[0317] Typically, the compositions of the instant invention will contain from less than 1% to about 95% of the active ingredient, preferably about 10% to about 50%. Generally, between about 100 mg and 500 mg will be administered to a child and between about 500 mg and 5 grams will be administered to an adult. Administration is generally by injection and often by injection to a localized area. The frequency of administration will be determined by the care given based on patient responsiveness. Other effective dosages can be readily determined by one of ordinary skill in the art through routine trials establishing dose response curves.

[0318] In order to calculate the amount of sulfatase enzyme, those skilled in the art could use readily available information with respect to the amount of enzyme necessary to remove a given amount of sulfatase. For example, if a given enzyme has an activity such that one unit of the enzyme removes 1 micromole/min. of SO₄ from a substrate at physiological pH, then one would administer from 1 to 10 units intravenously to a 70 kg. human for therapeutic purposes. The amount of an agent necessary to increase a level of enzymatically active subject sulfatase can be calculated from in vitro experimentation. For example, by calculating the amount of agent necessary to increase removal of sulfate groups from a given amount of substrate and estimating the amount of such substrate (or its in vivo equivalent) within the area to be treated, an amount of agent to be administered can be determined. The amount of agent will, of course, vary depending upon the particular agent used.

[0319] In the subject methods, the active agent(s) may be administered to the host using any convenient means capable of resulting in the desired inhibition of sulfatase activity. Thus, the agent can be incorporated into a variety of formulations for therapeutic administration. More particularly, the agents of the present invention can be formulated into pharmaceutical compositions by combination with appropriate, pharmaceutically acceptable carriers or diluents, and may be formulated into preparations in solid, semi-solid, liquid or gaseous forms, such as tablets, capsules, powders, granules, ointments, solutions, suppositories, injections, inhalants and aerosols.

[0320] As such, administration of the agents can be achieved in various ways, including oral, buccal, rectal, parenteral, intraperitoneal, intradermal, transdermal, intracheal,etc., administration.

[0321] In pharmaceutical dosage forms, the agents may be administered in the form of their pharmaceutically acceptable salts, or they may also be used alone or in appropriate association, as well as in combination, with other pharmaceutically active compounds. The following methods and excipients are merely exemplary and are in no way limiting.

[0322] For oral preparations, the agents can be used alone or in combination with appropriate additives to make tablets, powders, granules or capsules, for example, with conventional additives, such as lactose, mannitol, corn starch or potato starch; with binders, such as crystalline cellulose, cellulose derivatives, acacia, corn starch or gelatins; with disintegrators, such as corn starch, potato starch or sodium carboxymethylcellulose; with lubricants, such as talc or magnesium stearate; and if desired, with diluents, buffering agents, moistening agents, preservatives and flavoring agents.

[0323] Suitable excipient vehicles are, for example, water, saline, dextrose, glycerol, ethanol, or the like, and combinations thereof. In addition, if desired, the vehicle may contain minor amounts of auxiliary substances such as wetting or emulsifying agents or pH buffering agents. Actual methods of preparing such dosage forms are known, or will be apparent, to those skilled in the art. See, e.g., Remington's Pharmaceutical Sciences, Mack Publishing Company, Easton, Pa., 17th edition, 1985. The composition or formulation to be administered will, in any event, contain a quantity of the chlorate/selenate and/or sulfatase adequate to achieve the desired state in the subject being treated.

[0324] The agents can be formulated into preparations for injection by dissolving, suspending or emulsifying them in an aqueous or nonaqueous solvent, such as vegetable or other similar oils, synthetic aliphatic acid glycerides, esters of higher aliphatic acids or propylene glycol; and if desired, with conventional additives such as solubilizers, isotonic agents, suspending agents, emulsifying agents, stabilizers and preservatives.

[0325] The agents can be utilized in aerosol formulation to be administered via inhalation. The compounds of the present invention can be formulated into pressurized acceptable propellants such as dichlorodifluoromethane, propane, nitrogen and the like.

[0326] Furthermore, the agents can be made into suppositories by mixing with a variety of bases such as emulsifying bases or water-soluble bases. The compounds of the present invention can be administered rectally via a suppository. The suppository can include vehicles such as cocoa butter, carbowaxes and polyethylene glycols, which melt at body temperature, yet are solidified at room temperature.

[0327] Unit dosage forms for oral or rectal administration such as syrups, elixirs, and suspensions may be provided wherein each dosage unit, for example, teaspoonful, tablespoonful, tablet or suppository, contains a predetermined amount of the composition containing one or more inhibitors. Similarly, unit dosage forms for injection or intravenous administration may comprise the inhibitor(s) in a composition as a solution in sterile water, normal saline or another pharmaceutically acceptable carrier.

[0328] The term “unit dosage form,” as used herein, refers to physically discrete units suitable as unitary dosages for human and animal subjects, each unit containing a predetermined quantity of compounds of the present invention calculated in an amount sufficient to produce the desired effect in association with a pharmaceutically acceptable diluent, carrier or vehicle. The specifications for the novel unit dosage forms of the present invention depend on the particular compound employed and the effect to be achieved, and the pharmacodynamics associated with each compound in the host.

[0329] The pharmaceutically acceptable excipients, such as vehicles, adjuvants, carriers or diluents, are readily available to the public. Moreover, pharmaceutically acceptable auxiliary substances, such as pH adjusting and buffering agents, tonicity adjusting agents, stabilizers, wetting agents and the like, are readily available to the public.

[0330] Where the agent is a polypeptide, polynucleotide, analog or mimetic thereof, e.g. antisense composition, it may be introduced into tissues or host cells by any number of routes, including viral infection, microinjection, or fusion of vesicles. Jet injection may also be used for intramuscular administration, as described by Furth et al. (1992), Anal Biochem 205:365-368. The DNA may be coated onto gold microparticles, and delivered intradermally by a particle bombardment device, or “gene gun” as described in the literature (see, for example, Tang et al. (1992), Nature 356:152-154), where gold microprojectiles are coated with the therapeutic DNA, then bombarded into skin cells.

[0331] Those of skill will readily appreciate that dose levels can vary as a function of the specific compound, the severity of the symptoms and the susceptibility of the subject to side effects. Preferred dosages for a given compound are readily determinable by those of skill in the art by a variety of means.

[0332] By treatment is meant at least an amelioration of the symptoms associated with the pathological condition afflicting the host, where amelioration is used in a broad sense to refer to at least a reduction in the magnitude of a parameter, e.g. symptom, associated with the pathological condition being treated, such as inflammation and pain associated therewith. As such, treatment also includes situations where the pathological condition, or at least symptoms associated therewith, are completely inhibited, e.g. prevented from happening, or stopped, e.g. terminated, such that the host no longer suffers from the pathological condition, or at least the symptoms that characterize the pathological condition.

[0333] A variety of hosts are treatable according to the subject methods. Generally such hosts are “mammals” or “mammalian,” where these terms are used broadly to describe organisms which are within the class mammalia, including the orders carnivore (e.g., dogs and cats), rodentia (e.g., mice, guinea pigs, and rats), and primates (e.g., humans, chimpanzees, and monkeys). In many embodiments, the hosts will be humans.

[0334] The various sulfatases and agent of the present invention can be used by themselves, with each other, or in combination with pharmaceutically acceptable excipient materials as described above.

[0335] Kits with unit doses of the active agent, usually in oral or injectable doses, are provided. In such kits, in addition to the containers containing the unit doses will be an informational package insert describing the use and attendant benefits of the drugs in treating pathological condition of interest. Preferred compounds and unit doses are those described herein above.

### EXAMPLES

[0336] The following examples are put forth so as to provide those of ordinary skill in the art with a complete disclosure and description of how to make and use the present invention, and are not intended to limit the scope of what the inventors regard as their invention nor are they intended to represent that the experiments below are all or the only experiments performed. Efforts have been made to ensure accuracy with respect to numbers used (e.g. amounts, temperature, etc.) but some experimental errors and deviations should be accounted for. Unless indicated otherwise, parts are parts by weight, molecular weight is weight average molecular weight, temperature is in degrees Centigrade, and pressure is at or near atmospheric. Standard abbreviations are used, e.g., min., minutes; hr/hrs, hour/hours; sec., seconds; etc.

### Example 1

[0337] Identification of Novel Human Sulfatase-Encoding Nucleic Acid Molecules

[0338] HuSULF-1 and huSULF-2 sequences were derived based on a partial protein sequence (15 amino acids), and using a BLAST (i.e., tblastn) search of the NCBI public database to find expressed sequence tags that overlapped with the protein sequence. The new ESTs were then used to find additional corresponding ESTs and genomic sequences from public databases. A contig was assembled to yield a full-length cDNA. We were also able to identify from human ESTs and genomic sequences a full-length cDNA sequence corresponding to human sulf2, which is highly related to human sulf-1. From the cDNAs for the two genes, we derived predicted protein sequences. The nucleotide sequence of huSULF-1 cDNA is provided in FIGS. 1Ai and 1Aii, the amino acid sequence of huSULF-1 is provided in FIG. 1B. The nucleotide sequence of huSULF-2 cDNA is provided in FIGS. 2Ai and 2Aii; the amino acid sequence of huSULF-2 is provided in FIG. 2B.

[0339] Using a similar approach, we derived full-length sequences of mouse SULF-1 and mouse SULF-2. The nucleotide sequence of mouse SULF-1 cDNA is provided in FIGS. 3Ai and 3Aii; the amino acid sequence of mouse SULF-1 is provided in FIG. 3B. The nucleotide sequence of mouse SULF-2 cDNA is provided in FIGS. 4Ai and 4Aii; the amino acid sequence of mouse SULF-2 is provided in FIG. 4B.

### Example 2

[0340] Determining the Frequency of Expression of huSULF-1 and huSULF-2 in Normal and Cancerous Tissues.

[0341] Expressed Sequence Tags (EST)

[0342] The electronic northerns were accomplished as follows. The Genbank huEST database was subjected to a BLAST search (blastn) with the full length cDNAs of human sulf-1 and human sulf-2 respectively. Only those hits with p<1E-100(perfect matches) were collected (total of 98 for either huSULF). At this stringency there were no redundant ESTs that mapped to both isozymes. The source of each EST was determined by examining every single pertinent GenBank record and tabulating the results. Similar sources such as glioblastoma and brain cancer were pooled. The results are shown in FIGS. 5, 6, and 7. The results indicate that huSULF1 and huSULF2 are expressed at elevated levels in cancerous tissue, when compared to normal, non-cancerous tissue.

[0343] Sage

[0344] Serial analysis of gene expression, or SAGE, is a technique designed to take advantage of high-throughput sequencing technology to obtain a quantitative profile of cellular gene expression. Essentially, the SAGE technique measures not the expression level of a gene, but quantifies a “tag” which represents the transcription product of a gene. A tag, for the purposes of SAGE, is a nucleotide sequence of a defined length, directly 3′-adjacent to the 3′-most restriction site for a particular restriction enzyme. As originally described, the length of the tag was nine bases, and the restriction enzyme NlaIII. Current SAGE protocols produce a ten to eleven base tag, and, although NlaIII remains the most widely used restriction enzyme, enzyme substitutions are possible. The data product of the SAGE technique is a list of tags, with their corresponding count values, and thus is a digital representation of cellular gene expression. Velculescu V E, Zhang L, Vogelstein B, Kinzler K W. Serial analysis of gene expression. Science. Oct. 20, 1995;270(5235):484-7; and Zhang L, Zhou W, Velculescu V E, Kern S E, Hruban R H, Hamilton S R, Vogelstein B, Kinzler K W. Gene expression profiles in normal and cancer cells. Science. May 23, 1997;276(5316):1268-72. There are currently approximately 3×10⁶ SAGE tags from about 80 libraries.

[0345] SAGE libraries were examined for the presence of huSULF2 sequences. Libraries corresponding to normal and cancerous tissues (both cell lines and tissue samples) were analyzed. The results are shown in Table 1. The number of total available SAGE tags is provided, as well as the number of available tags that contain huSULF2 sequence.

TABLE 1

| | |
|---|---|
| Normal | Cancerous |

BREAST

| | | |
|---|---|---|
| Total available | 136,256 | 279,790 |
| huSULF2 | 14 | 180 |

COLON

| | | |
|---|---|---|
| Total available | 235,923 | 621,404 |
| huSULF2 | 15 | 196 |

[0346] The data provided in Table 1 indicate that both huSULF1 and huSULF2 are highly expressed in cancerous cells.

### Example 3

[0347] SAGE Analysis of huSULF-1 and huSULF-2

[0348] When SAGE analysis was applied to the human sulf-1 and sulf-2, there were striking findings. In the case of hsulf-1, significantly more tags were found in cancer tissue (normalized to specific tags per million of total tags) compared to normal tissue for both pancreas and prostate. The results are shown in FIG. 8.

[0349] In the case of sulf-2, the findings were even more dramatic. For 4 different cancers (pancreas, breast, central nervous system, and colon), the normalized tag representation (based on specific tags per million of total tags) was significantly higher in the cancer tissue as compared to the normal counterpart tissue. The results were most dramatic for breast cancer. Here the expression in the cancer tissue was extremely high, about 6-fold higher than in any of the other cancer tissues, and furthermore the level in breast cancer tissue was 17-fold higher than in normal breast tissue. The results are shown in FIG. 9.

[0350] These results indicate the upregulation of sulf gene expression in human cancers, with one or the other sulf gene more important depending on the nature of the cancer. Thus, the sulf gene products—extracellular sulfatase enzymes—are appropriate targets for cancer therapy. Inhibition of these enzymes blocks the growth of tumors by preventing the release of growth factors or blocks the formation of new blood vessels associated with tumor growth (angiogenesis) and therefore prevents the growth and metastasis of the tumors.

### Example 4

[0351] cDNA Cloning

[0352] Human SULF2

[0353] A 4286 bp cDNA was identified, and isolated from a human lung cDNA library and sequenced along both strands. This cDNA contains a 2613 bp open reading frame (ORF) that encodes an 870 amino acid polypeptide termed human SULF2. The human SULF2 gene is situated on human chromosome 20q12-13.2 since a genomic clone containing exons 11 through 20 of this gene has been localized to this region previously (Genbank accession no. AL034418). The nucleotide sequence of huSULF-2 cDNA is provided in FIGS. 10Ai and 10Aii, the amino acid sequence of huSULF-2 is provided in FIG. 10B.

[0354] Mouse SULF2

[0355] A cDNA encoding the mouse homologue of human SULF2 was identified in IMAGE clone 3155559 (Genbank accession no. AW763993) derived from a mouse mammary tumor. This clone was retrieved and DNA was prepped and sequenced along both strands. It was found to contain a 3613 bp cDNA containing a 2628 bp ORF encoding an 875 amino acid protein termed mouse SULF2 that is 94.6% identical to human SULF2 on the amino acid level (GCG-BESTFIT). The nucleotide sequence of mouse SULF-2 cDNA is provided in FIGS. 11Ai and 11Aii; the amino acid sequence of mouse SULF-2 is provided in FIG. 11B.

### Example 5

[0356] Genomic Organization of the Human SULF2 Gene

[0357] Fragments of the human SULF2 cDNA were used to screen the Genbank nr and htgs databases for matching genomic fragments. The retrieved matches were then assembled using the Sequencher contig alignment software. Thus four contigs (I, II, III, and IV) were assembled that contain the entire huSULF2 cDNA as 21 exons. The concanated sequence is provided in SEQ ID NO:22. The three gaps separating the four contigs are indicated by trains of N (NNNNNNNNNNN). The length of these three gaps is presently unknown. The genomic organization of the gene was determined. The lengths, relative positions, and separating gaps of all 21 exons are shown in FIG. 12. Contig I is expected to contain regulatory elements (promotor and enhancer sequences) upstream of exon 1.

### Example 6

[0358] Analysis of Protein Structure

[0359] FIG. 13 shows the structure of huSULF-1 and huSULF-2 proteins. Human sulf-1 is 871 amino acids and human sulf-2 is 870 amino acids in length. Hu-SULF1 and huSULF-2 are 65% identical at the amino acid level. Both have cleavable signal sequences at the amino termini of the proteins: 1-22 amino acids for sulf-1 and 1-24 amino acids for sulf-2. This feature indicates that these enzymes are secreted from the cells of origin (in contrast to the lysosomal glucosamine-6-sulfatase enzyme) and are present in the extracellular space where they can act on extracellular heparan sulfate proteoglycans and related glycoconjugates. Following the signal sequences are “sulfatase” domains which extend to about amino acid 400. This “sulfatase” designation is based on a block analysis of the protein. In this region, the closest homologue is the lysosomal glucosamine-6-sulfatase, which shows about 49% identity at the amino acid level to sulf proteins over this region (24-400 amino acids). Thus the sulf proteins are glucosamine-6-sulfatase enzymes with activity against heparan sulfate glycosaminoglycans and related glycoconjugates.

[0360] Within the first sulfatase domains are cleavage sites for the furin/PACE protease processing enzymes. This cleavage occurs between residues 408 (arginine) and 409 (aspartic acid) and/or between 576 (arginine) and 577 (histidine), and/or between 661 (arginine) and 662 (glutamic acid), and/or between 669 (arginine) and 670 (arginine), and/or between 732 (arginine) and 733 (glutamine) of hsulf-1. The cleavage occurs between 409 (arginine) and 410 (aspartic acid) and/or between 423 (arginine) and 424 (aspartic acid) and/or between 538 (arginine) and 539 (serine) and/or between 565 (arginine) and 566 (histidine), and/or between 646 (arginine) and 647 (glutamic), and/or between 656 (arginine) and 657 (proline) and/or between 848 (arginine) and 849 (lysine) of hsulf-2. Cleavage is necessary for activity of the enzyme.

[0361] Following the first “sulfatase domain” are hydrophilic domains containing a high concentration of charged amino acids which are predominantly basic in nature. These domains are comprised of about 370 amino acids.

[0362] Immediately following the sulfatase domain of the Sulfs is a hydrophilic region of 300-320 amino acids, containing a high content of charged amino acids, ≈27% of which are basic and ≈13% are acidic. At the C-terminus of each of the newly cloned Sulfs is a region of 108 residues, which shows significant homology to the C-terminal region of human lysosomal glucosamine-6-sulfatase (HG6S). In this region, there is complete conservation of 30 of 108 residues between HG6S and the two human Sulfs. Interestingly, this region also bears significant homology to a GlcNAc transferase from Arabidopsis thaliana (AAL60196). Over a 74 amino acid segment (626-699) of this plant protein, 8 of the aforementioned 30 amino acids are conserved. These comparisons suggest that the C-terminal regions of the Sulfs and the lysosomal G6S may be involved in recognition of glucosamine/GlcNAc components of substrates. This domain is referred to as the “G6S-related domain.”

[0363] Inspection of the sequences reveals additional features that are shared by the mammalian Sulfs. Each protein exhibits a predicted coiled-coil structural unit of 34-35 residues. This feature is found in a corresponding position within the hydrophilic region of each protein (Table 2). Short coiled-coils serve as multimerization elements for a large number of both intracellular and extracellular proteins. The Sulf sequences also contain several consensus cleavage sites for furin, a trans-Golgi network endoprotease. These sites, which are mostly found in the hydrophilic regions, are highly conserved between the mouse and human orthologs of Sulf-1 and Sulf-2. As demonstrated below, processing of the secreted forms of the mammalian Sulfs appears to involve furin-mediated cleavage events.

TABLE 2
Features of the Sulf (sulfatase) proteins

| Feature | HSulf-1 | MSulf-1 | HSulf-2 | MSulf-2 |
|---|---|---|---|---|
| Length (aa) | 871 | 870 | 870 | 875 |
| No. N-linked sites | 10 | 10 | 11 | 11 |
| Signal sequence* | 1-22 | 1-27 | 1-24 | 1-24 |
| Sulfatase domain# | 42-414 | 42-414 | 43-415 | 43-415 |
| Hydrophilic region | 415-735 | 415-734 | 416-715 | 416-721 |
| G6S-related region | 736-843 | 735-842 | 717-824 | 722-829 |
| Coiled-coil** | 639-673 | 638-672 | 623-658 | 629-663 |
| | 408-409 | 408-409 | 409-410 | 409-410 |
| | 576-577 | 575-576 | 423-424 | 423-424 |
| Furin cleavage sites | 661-662 | 660-661 | 538-539 | 543-544 |
| | 669-670 | | 565-566 | |
| | 732-733 | 731-732 | 646-647 | 651-652 |
| | | | 656-657 | 661-662 |
| | | | 848-849 | 853-854 |

[0364] FIG. 14 presents a model of activity of a subject sulfatase. Subject sulfatases are extracellular enzymes that remove sulfate from the C-6 position of glucosamine (GlCN) or N-Acetyl glucosamine (GlcNAc) within heparan sulfate proteoglycans on the cell surface or in the extracellular matrix. The sulfatase releases growth factors/differentiation factors/angiogenic factors. An example of such a factor is vascular endothelial growth factor (VEGF). Release of VEGF makes it available to endothelial cells (EC), converting a quiescent (e.g., non-angiogenic) EC to a proliferating (e.g., angiogenic) EC.

### Example 7

[0365] Expression of hsulf-1 and hsulf-2 in CHO Cells

[0366] Methods

[0367] Human sulf-1 (hsulf-1), hsulf-2 cDNA, mouse sulf-1 (msulf-1), and msulf-2 cDNAs were digested with XhoI and BamHI, HindIII and XhoI, NheI and HindIII, or HindIII and XhoI restriction enzymes, respectively and subcloned into the corresponding sites of pcDNA3.1/Myc-His(−) (Invitrogen Inc. ). This 5.5 kb vector is designed for overproduction of recombinant proteins with a C-terminal tags consisting of a polyhistidine metal-binding tag and the myc epitope. Chinese hamster ovary cells (CHO) were grown in 10 cm dishes and transfected with 5 μg of pcDNA3.1/Myc-His(−)-hsulf-1, -hsulf-2, -msulf-1, or -msulf-2 using Lipofectamine and Plus reagent (Invitrogen Inc.) according to the manufacturer's instructions. DNA was mixed with Plus reagent and incubated for 15 minutes at room temperature.

[0368] The complexed DNA was combined with Lipofectamine reagent (diluted in OptiMEM (GIBCO BRL)) and incubated for 15 minutes at room temperature. The complexes were added to cells in culture dishes, and incubated at 37° C. at 5% CO₂ for 5 hours. After incubation, medium was replaced with OptiMEM. Cells were allowed to grow for an additional 48 hours, and the conditioned medium was collected. The samples were concentrated on a Centricon30 microconcentrator (Amicon), separated by electrophoresis on reducing SDS-8% polyacrylamide gels (ISC BioExpress), blotted to ProBlott™ (Applied Biosystems). The membranes were blocked for 1 hour with 5% non-fat milk and then incubated overnight with a 0.22 μg/ml dilution of anti-Myc antibody (Invitrogen) in 5% non-fat milk. Membranes were washed and incubated with horseradish peroxidase goat anti mouse IgGl (0.4 μg/ml dilution) (Caltag) for 1 hour before enhanced chemiluminescence (ECL) detection reagents (Amersham Pharmacia).

[0369] Results

[0370] The 4 sulfatase fusion proteins were detected as a series of bands as follows (hsulf-1: 126, 61, 53 kDa) (hsulf-2: 126, 61 kDa), (msulf-1: 126, 61, 49, 40 kDa) and (msulf-2: 126, 71, 66 kDa).

[0371] Expression and Proteolytic Processing of Sulf Proteins in CHO Cells

[0372] Sulf-1 and Sulf-2 cDNAs (mouse and human) were subcloned into the pcDNA3.1/Myc-His expression vector in order to generate recombinant proteins with a tandem arrangement of a His and a Myc tags at their C-termini. Initially, we transfected COS-7 with cDNAs for Sulf-1 and Sulf-2 (mouse and human). Taking advantage of the Myc tag for Western blotting, we detected a 132 kDa band for each Sulf in detergent lysates of the transfected cells but failed to observe reactivity in the conditioned medium of these cells. We also detected expression of the tagged proteins on the cell surface of transfected COS cells by immunofluorescence. These results parallel the findings with respect to QSulf-1 and RSulfFP1. However, when we used CHO cells for transfection, analysis of conditioned media by Western blotting (anti-Myc antibodies) revealed a series of bands. The results observed for HSulf-1 and HSulf-2 are very similar to those observed for the mouse orthologs. In each case, the highest molecular weight species had an apparent molecular weight of 132 kDa. Based on primary amino acid sequence, the calculated molecular weights of the tagged Sulf proteins were 100 kDa after cleavage of the signal sequences. The extra mass is attributable to N-glycosylation, since N-glycanase treatment of either HSulf-1 or HSulf-2 reduced the molecular weight of the 132 kDa species to ≈100 kDa. Interestingly, HG6S is also substantially glycosylated with 13 potential N-linked sites of which at least 10 are used.

### Example 8

[0373] Verification of the Sulfatase Activities of the Sulf Proteins

[0374] Methods

[0375] Arylsulfatase Activity Assay

[0376] The 100-fold concentrated conditioned medium (CM) derived from each transfection of CHO cells as described above was dialyzed into 50 mM HEPES, pH 8.0. The His-tagged fusion proteins were bound to a Ni-NTA resin (QIAGEN) by rotation at 4° C. over night, then washed with 50 mM HEPES (pH 8.0), 3 times. 250 mM imidazole in 50 mM HEPES, pH 8.0 was used to elute the His-tagged fusion proteins from Ni-NTA. The resins with bound material or the eluates were mixed with 10 mM 4-methylumbelliferyl-sulfate (4-MUS; a substrate for sulfatases), and 10 mM lead acetate, in a total volume of 100 μl. The reaction mixtures were incubated at 37° C. for various periods of time. Reactions were terminated by the addition of 100 μl of 0.5 M Na₂CO₃/NaHCO₃, pH 10.7 to 20 μl of the reaction mixture. The fluorescence of 4-methylumbelliferone was measured on a Multi-Well Plate Reader CytoFluorII (PerSeptive Biosystems). The fluorescence was determined at an excitation wavelength of 360 nm and emission wavelength of 460 nm. A substrate dose response curve was performed over the concentration range of 1 to 10 mM 4-MUS. Vₘₐₓ values were approximated from these data, employing the estimate of the Sulf protein concentrations in the CM.

[0377] Results

[0378] Time-dependent sulfatase activity was detected for both the hsulf-1 and hsulf-2 fusion proteins. The activity varied with the concentration of enzyme added, as demonstrated for hsulf-1. These results demonstrated unequivocally that the subject proteins possess sulfatase activity.

[0379] Arylsulfatase Activity of Expressed Proteins

[0380] The synthetic fluorogenic compound 4-methylumbelliferyl sulfate (4-MUS) serves as a substrate for most sulfatases, both in the lysosomal and non-lysosomal classes. CHO cells were transfected with a cDNA for HSulf-1 or HSulf-2 or a vector control. Conditioned medium was collected and incubated with nickel resin (Ni-NTA) to bind the His-tagged recombinant proteins. The bead-bound material was assayed for activity on 4-MUS. For both enzymes, hydrolysis depended on time of reaction (FIG. 15A), concentration of substrate (FIG. 15B), and amount of CM (FIG. 15C). From the substrate dose-response curves of FIG. 15B and based on estimates of Sulf protein levels in CM, we approximated Vₘₐₓ for the two Sulfs to be in the range of 1000-2000 nmol per min per mg of Sulf protein. Human glucosamine-6-sulfatase has a considerably lower Vₘₐₓ against 4-MUS (100 nmol per min per mg) whereas the Vₘₐₓ of human N-acetylgalactosamine-4-sulfatase (arylsulfatase B) is much higher (48000).

[0381] As described above, a conserved cysteine in the sulfatase domain of eukaryotic sulfatases is essential for their catalytic activities. We mutated the corresponding residues in Sulf-1 (Cys87) and Sulf-2 (Cys88) and the adjacent cysteines to alanines. While the levels of the mutant proteins in CM were equivalent to those of the wild-type, arylsulfatase activity was completely lost for both proteins (FIG. 15C).

[0382] FIGS. 15A-D. Arylsulfatase activity of expressed Sulfs and Lack of the activity in HSulf mutants. HSulf-1, HSulf-2 or their mutated forms (HSulf-1 ACC and HSulf-2 ΔCC) was purified from the conditioned medium of transfected CHO cells by binding to Ni-NTA beads. A) The bead-bound material was tested for arylsulfatase activity as a function of time against 10 mM 4-MUS substrate at pH 8. The “no-enzyme” control was based on testing conditioned medium from vector-control transfected CHO cells. No activity was detected in the absence of added substrate (not shown). The same results were obtained in 3 different experiments. B) The concentrated conditioned medium was tested for arylsulfatase activity at pH 8 for 2 hr at different concentrations (1-10 mM) of 4-MUS. To eliminate background effects, the activity in vector control material was subtracted from that of Sulf transfected material. C) The eluted material from Ni-NTA was tested for arylsulfatase activity at pH 8 for 2 hr as a function of input volume of conditioned medium. The same results were obtained in 3 different experiments. D) Bead-bound Sulfs were tested for arylsulfatase activity (1 hr) at the indicated pH values. The activity of each Sulf was determined relative to that of beads exposed to an equivalent volume of vector-control conditioned medium. The activity of HG6S was determined (24 hr incubation) relative to that of the buffer. The same results were obtained in 3 different experiments.

### Example 9

[0383] Endosulfatase Activity and pH Dependency

[0384] Methods

[0385] Determination of pH Dependency of Sulfatase Activity

[0386] To determine the pH dependency of the activity of sulfatase, His-tagged fusion proteins bound to Ni-NTA resin were washed with H₂O three times and mixed with 10 mM 4-MUS, 10 mM lead acetate and 50 mM HEPES (pH 8.0 or pH 7.0) or 50 mM sodium acetate buffer (pH 5.0 or pH 6.0). Human glucosamine-6-sulfatase was purchased from Glyko Inc. (Novato, Calif.) and was tested at a concentration of 1 milliunit.

[0387] In order to block the potential N-formylglycine modification of Cys 87 of HSulf-1 and Cys88 of HSulf-2, cysteines 87 and 88 of HSulf-1 (designated as HSulf-1 ΔCC) and cysteines 88 and 89 of HSulf-2 (designated as HSulf-2 ΔCC) were mutated to alanines using the QuikChange™ XL Site-Directed Mutagenesis kit (Stratagene, La Jolla, Calif.) according to the manufacturer's instructions.

[0388] Endo-Glucosamine-6-Sulfatase Assays of the Sulfatases

[0389] The procedures of Yoshida et al ((1989) Anal. Biochem. 177:327-332) were adapted for these assays. CM from transfected CHO cells (wild-type Sulfs, vector control or the double cysteine mutants) was prepared as described above. The standard reaction mixture contained 5 μmol of Tris-HCl, pH 7.5, 1 μmol of MgCl₂, 10 μg of porcine intestinal heparin (Sigma, St. Louis, Mo.) and 20 μl of the 100-fold concentrated CM in a total volume of 100 μl. After incubation at 37° C. for 8 hr, the reaction was stopped by heating at 100° C. for 2 min. A mixture of 1 milliunit of Heparinase I (EC 4.2.2.7, Sigma), 0.25 milliunits of Heparinase II (Sigma) and 0.1 milliunits of Heparinase III (EC 4.2.2.8, Sigma) in 1.5 μl of 50 mM Tris-HCl, pH 7.5, was added to the reaction mixture and incubated at 37° C. for 3 hr. The digestion was stopped by heating at 100° C. for 2 min, and the mixture was filtered by centrifugation in an Ultrafree-MC filter (Millipore).

[0390] The disaccharides of the digested heparin were then analyzed by HPLC on a Partisil-10 SAX column (Whatman, Fairfield, N.J.) run at 41° C. Disaccharides were eluted from the column by increasing the ionic strength as follows: time 0-5 min, 12 mM KH₂PO₄; time 5-40 minutes, gradient from 12 mM to 600 mM; time 40-45 min, 600 mM. Absorbance at 232 nm was monitored and components were identified by comparison with authentic unsaturated disaccharide markers from Sigma, i.e. ΔDiHS-OS, ΔDiHS-6S, ΔDiHS-NS, ΔDiHS-(N,6)diS, ΔDiHS-(N,2)diS and ΔDiHS-(N,6,2)triS. The endo-glucosamine-6-sulfatase activities of human Sulf-1 and Sulf-2 against heparin proceeded linearly up to 10 hr under these conditions. In other assays, 10 μg of chondroitin 6-sulfate was employed as a substrate in the standard assay. After incubation with CM, 15 milliunits of Chondroitinase ABC (EC 4.2.2.4, Sigma) was used to fragment the chondroitin sulfate. The standards used were as follows: ΔDi-0S, -66 Di-6S, ΔDi-4S, ΔDi-diSD(2,6) and ΔDi-diSE(4,6). All were from Oxford GlycoSystems Inc.

[0391] Results

[0392] pH Dependency of Sulfatase Activity

[0393] As demonstrated in FIG. 15D, maximal activity of the sulfatase was observed at pHs of 7 and 8. In contrast, the lysosomal enzyme, HG6S, assayed under the same conditions, showed measurable activity at pH 5 but none at pH 8, consistent with the acidic milieu of the lysosome. This finding dictated the use of neutral pH's (7.5-8) for the other assays (FIGS. 15A-15C) and for the endosulfatase experiments described below.

[0394] Endo-glucosamine-6-sulfatase Activity of Expressed Proteins.

[0395] The Sulfs (sulfatases) are active on heparin/heparan sulfate. Indeed, the sulfatases described above are endosulfatases, in contradistinction to glucosamine-6-sulfatase, which like other lysosomal sulfatases, is an exosulfatase.

[0396] We treated intact heparin (10 μg) with conditioned medium from Sulf transfected CHO cells. To analyze activity on specific sulfation modifications, we digested the treated heparin with a mixture of bacterial heparinases and analyzed the disaccharide products by HPLC using standards (Yoshida, supra). Both HSulf-1 CM and Hsulf-2 CM produced an ≈80% reduction in the amount of trisulfated units (ΔDiHS-(N,6,2)triS) corresponding to IdoA2S-GlcNS6S and a parallel increase in that of disulfated units (ΔDiHS-(N,2)diS) corresponding to IdoA2S-GlcNS (FIG. 16A-C). There were no effects on the disulfated units ΔDiHS-(N,6)diS, monosulfated or non-sulfated units. Specific activities were calculated based on the volume of CM (Table 3). The endosulfatase activities of Sulf-1 and Sulf-2 CM were increased 9-fold and 10-fold respectively relative to CM from mock transfected cells (Table 3). Mutation of the critical cysteines within the two Sulfs resulted in the complete loss of these activities (Table 3). Further selectivity of the endosulfatase activity was indicated when we employed chondroitin 6-sulfate as a substrate. As shown in FIG. 16D-F, N-acetylgalactosamine 6-sulfate residues in chondroitin 6-sulfate did not serve as substrates for the Sulfs. Thus the Sulfs are active against intact heparin. Treatment of intact heparin at neutral pH with either HSulf-1 or HSulf-2 resulted in ˜80% removal of sulfate from the 6-position of glucosamine within the tri-sulfated trisaccharides; however, there was no effect on GlcNS6S within disaccharide units when the neighboring IdoA lacked 2-O sulfation. These results establish that the Sulfs are endosulfatases with high selectivity for glucosamine 6-sulfate in the appropriate context within heparin and heparan sulfate.

[0397] FIGS. 16A-F. The conditioned medium of CHO cells transfected with the empty vector alone (A, D), HSulf-1 (B, E) or HSulf-2 (C, F) was prepared as described above. Porcine intestinal heparin (A-C) or shark cartilage chondroitin 6-sulfate (D-F) were incubated with the conditioned medium and then subsequently digested with either a mixture of bacterial heparinases or chondroitinase ABC. The resulting disaccharide fractions were analyzed by as described. The arrows correspond to the elution positions of authentic unsaturated disaccharide markers. The dotted lines indicate the concentrations of KH₂PO₄ used for elution.

TABLE 3
Endo-glucosamine-6-sulfatase activity of the Sulfs

| | Endo-glucosamine-6-sulfatase activity |
|---|---|
| Plasmid | (pmol/hr/ml of medium) |
| Mock | 9.4 ± 0.2 |
| HSulf-1 | 87.8 ± 0.1 |
| HSulf-1 ΔCC | 7.7 ± 1.2 |
| HSulf-2 | 96.6 ± 0.5 |
| HSulf-2 ΔCC | 5.6 ± 0.6 |

[0398] Endo-glucosamine-6-sulfatase activity was measured against intact heparin as described in above using CM derived from CHO cells transfected with the indicated vectors. HSulf-1 ΔCC and HSulf-2 ΔCC denote the CC87, 88AA and CC88, 89AA mutants, respectively. Endosulfatase activity was defined by calculating the moles of unsaturated trisulfated disaccharides from which the sulfate group on C-6 position was liberated in the standard assay (FIGS. 16A-F) by the Sulfs as compared to levels in untreated control samples. Values shown are means ±S.D. based on three independent reactions.

### Example 10

[0399] Expression of Sulf Genes in Human Breast Cancer Tissues

[0400] Methods

[0401] The Rapid-Scan Gene Expression Panel (Origene Inc.) is a set of cDNAs prepared from 12 independent normal breast tissues (human) and 12 independent breast cancer patients. A 314-bp hsulf-2 cDNA product was amplified using the following PCR primers: sense 5′-GAAAAGAGGCAGATTCACGTCGTTTCCAG-3′ (SEQ ID NO:25), antisense 5′-ATCTGGTGCTTCTTTTGGGATGCGGGAG-3′ (SEQ ID NO:26). The conditions for denaturation, annealing, and extension of the template cDNA were respectively: 94° C. for 30 seconds, 55° C. for 30 seconds, 72° C. for 1 minute for 40 cycles. For each source of cDNA, PCR was performed at 4 different cDNA concentrations (1×, 10×, 100× and 1000×) using TITANIUM™ Taq DNA Polymerase (Clontech). The PCR products were then electrophoresed on 2% agarose gels, and visualized with ethidium bromide.

[0402] Results

[0403] Nine of 12 of the breast cancer specimens were positive for hsulf-2 expression whereas none (0 of 12) of the normal breast tissue samples were positive at any cDNA concentration. The results are shown in Table 4, below. The level of expression of estrogen receptor (ER) and progesterone receptor (PR) on breast cancer tissues is also shown.

TABLE 4

| | | | | Expression |
|---|---|---|---|---|
| lane | Tissue | Grade | characteristics | of hsulf-2 |
| 1 | Normal breast | | | − |
| 2 | Normal breast | | | − |
| 3 | Normal breast | | | − |
| 4 | Normal breast | | | − |
| 5 | Normal breast | | | − |
| 6 | Normal breast | | | − |
| 7 | Normal breast | | | − |
| 8 | Normal breast | | | − |
| 9 | Normal breast | | | − |
| 10 | Normal breast | | | − |
| 11 | Normal breast | | | − |
| 12 | Normal breast | | | − |
| 13 | Invasive mixed tubular | 5 | ER+ | − |
| | carcinoma | | PR+ + + | |
| 14 | Invasive ductal | 9 | ER+ | − |
| | carcinoma | | PR+ + + | |
| 15 | Invasive lobular | 6 | ER+ + + + + + | + |
| | carcinoma | | PR+ + + + + | |
| 16 | Invasive ductal | 7 | ER+ + | − |
| | carcinoma | | PR− | |
| 17 | Invasive ductal | ? | ER+ + | + |
| | carcinoma | | PR− | |
| 18 | Invasive ductal | 6 | ER+ + + | + |
| | carcinoma | | PR+ | |
| 19 | Invasive ductal | 5 | ER+ + | + |
| | carcinoma | | PR+ | |
| 20 | Invasive ductal | 6 | ER+ | + |
| | carcinoma | | PR− | |
| 21 | Adenoid cystic | — | ER+ + | + |
| | carcinoma | | PR+ | |
| 22 | Invasive ductal | 5 | ER− | + |
| | carcinoma | | PR− | |
| 23 | Ductal carcinoma in-situ | — | ER+ | + |
| | | | PR+/− | |
| 24 | Invasive ductal | 8 | ER+ | + |
| | carcinoma | | PR+ | |

### Example 11

[0404] Pro-Angiogenic Activity of Hsulf-2

[0405] Sulf-2 functions as a heparan sulfate degrading enzyme (HSDE) during tumor angiogenesis by mobilizing angiogenic factors from sequestration with HSPGs We employed the chick chorioallantoic membrane (CAM) assay, a standard angiogenesis assay. CHO cells were stably transfected with HSulf-1, HSulf-2, or the empty vector and clones were isolated. Single clones of each type were implanted on the surface of the CAM of 9 day embryos. After 72 hrs, the number of new blood vessel branches was determined under a dissecting scope. As shown in FIG. 17, the CHO-Sulf-2 clone induced a dramatic response as compared to the CHO-Sulf-1 clone or the empty vector clone.

[0406] FIG. 17. Pro-angiogenic activity of HSulf-2. 5×10⁶ CHO cells were implanted on the CAM of 9-day chick embryos. The CHO cells were clones that were stably transfected with either the empty vector (clone V1), HSulf-1 (clone 9) or HSulf-2 (clone 18). After 72 hrs of further incubation, the number of blood vessel branches was counted under a dissecting microscope. 6 eggs were treated with each type of CHO cell. Means and standard errors of the means are indicated.

[0407] It is evident from the data presented above that the instant invention provides sulfatases that are glucosamine-6-sulfatase enzymes with activity against heparan sulfate glycosaminoglycans and related glycoconjugates. The enzymes are endosulfatases, capable of remove sulfate from internal glucamine-6-sulfate or N-acetylglucosamine-6-sulfate residues within glycosaminoglycans of heparan sulfate proteoglycans or from intact heparin The instant sulfatases are secreted from eukaryotic cells, and are expressed at higher than normal levels in cancerous tissue, compared to normal tissue. The instant invention also provides methods of assaying for sulfatase activity, which assay is readily adapted to a high throughput format. The enzymes are active at neutral pH, and so are specialized to function on the outside of cells.

[0408] While the present invention has been described with reference to the specific embodiments thereof, it should be understood by those skilled in the art that various changes may be made and equivalents may be substituted without departing from the true spirit and scope of the invention. In addition, many modifications may be made to adapt a particular situation, material, composition of matter, process, process step or steps, to the objective, spirit and scope of the present invention. All such modifications are intended to be within the scope of the claims appended hereto.

The application's sequence listing, which the Patent Office published only in electronic form, follows.

SEQUENCE LISTING (26 sequences)

SEQ ID NO: 1 - DNA, 5244 bp, Homo sapiens
ccacccaccatcatctaaagaagataaacttggcgaatgacatgcaggttcttcaaggcagaataattgcagaaaatcttcaaaggaccctatctgcagatgttctgaatacctctgagaatagagattgattattcaaccaggatacctaattcaaggactccagaaatcaggagacggagacattttgtcagttttgcaacattggaccaaaatacaatgaagtattcttgctgtgctctggttttggctgtcctgggcacagaattgctgggaagcctctgttcgactgtcagatccccgaggttcagaggacggatacagcaggaacgaaaaaacatccgacccaacattattcttgtgcttaccgatgatcaagatgtggagctggggtccctgcaagtcatgaacaaaacgagaaagattatggaacatgggggggccaccttcatcaatgcctttgtgactacacccatgtgctgcccgtcacggtcctccatgctcaccgggaagtatgtgcacaatcacaatgtctacaccaacaacgagaactgctcttccccctcgtggcaggccatgcatgagcctcggacttttgctgtatatcttaacaacactggctacagaacagccttttttggaaaatacctcaatgaatataatggcagctacatcccccctgggtggcgagaatggcttggattaatcaagaattctcgcttctataattacactgtttgtcgcaatggcatcaaagaaaagcatggatttgattatgcaaaggactacttcacagacttaatcactaacgagagcattaattacttcaaaatgtctaagagaatgtatccccataggcccgttatgatggtgatcagccacgctgcgccccacggccccgaggactcagccccacagttttctaaactgtaccccaatgcttcccaacacataactcctagttataactatgcaccaaatatggataaacactggattatgcagtacacaggaccaatgctgcccatccacatggaatttacaaacattctacagcgcaaaaggctccagactttgatgtcagtggatgattctgtggagaggctgtataacatgctcgtggagacgggggagctggagaatacttacatcatttacaccgccgaccatggttaccatattgggcagtttggactggtcaaggggaaatccatgccatatgactttgatattcgtgtgcctttttttattcgtggtccaagtgtagaaccaggatcaatagtcccacagatcgttctcaacattgacttggcccccacgatcctggatattgctgggctcgacacacctcctgatgtggacggcaagtctgtcctcaaacttctggacccagaaaagccaggtaacaggtttcgaacaaacaagaaggccaaaatttggcgtgatacattcctagtggaaagaggcaaatttctacgtaagaaggaagaatccagcaagaatatccaacagtcaaatcacttgcccaaatatgaacgggtcaaagaactatgccagcaggccaggtaccagacagcctgtgaacaaccggggcagaagtggcaatgcattgaggatacatctggcaagcttcgaattcacaagtgtaaaggacccagtgacctgctcacagtccggcagagcacgcggaacctctacgctcgcggcttccatgacaaagacaaagagtgcagttgtagggagtctggttaccgtgccagcagaagccaaagaaagagtcaacggcaattcttgagaaaccaggggactccaaagtacaagcccagatttgtccatactcggcagacacgttccttgtccgtcgaatttgaaggtgaaatatatgacataaatctggaagaagaagaagaattgcaagtgttgcaaccaagaaacattgctaagcgtcatgatgaaggccacaaggggccaagagatctccaggcttccagtggtggcaacaggggcaggatgctggcagatagcagcaacgccgtgggcccacctaccactgtccgagtgacacacaagtgttttattcttcccaatgactctatccattgtgagagagaactgtaccaatcggccagagcgtggaaggaccataaggcatacattgacaaagagattgaagctctgcaagataaaattaagaatttaagagaagtgagaggacatctgaagagaaggaagcctgaggaatgtagctgcagtaaacaaagctattacaataaagagaaaggtgtaaaaaagcaagagaaattaaagagccatcttcacccattcaaggaggctgctcaggaagtagatagcaaactgcaacttttcaaggagaacaaccgtaggaggaagaaggagaggaaggagaagagacggcagaggaagggggaagagtgcagcctgcctggcctcacttgcttcacgcatgacaacaaccactggcagacagccccgttctggaacctgggatctttctgtgcttgcacgagttctaacaataacacctactggtgtttgcgtacagttaatgagacgcataattttcttttctgtgagtttgctactggctttttggagtattttgatatgaatacagatccttatcagctcacaaatacagtgcacacggtagaacgaggcattttgaatcagctacacgtacaactaatggagctcagaagctgtcaaggatataagcagtgcaacccaagacctaagaatcttgatgttggaaataaagatggaggaagctatgacctacacagaggacagttatgggatggatgggaaggttaatcagccccgtctcactgcagacatcaactggcaaggcctagaggagctacacagtgtgaatgaaaacatctatgagtacagacaaaactacagacttagtctggtggactggactaattacttgaaggatttagatagagtatttgcactgctgaagagtcactatgagcaaaataaaacaaataagactcaaactgctcaaagtgacgggttcttggttgtctctgctgagcacgctgtgtcaatggagatggcctctgctgactcagatgaagacccaaggcataaggttgggaaaacacctcatttgaccttgccagctgaccttcaaaccctgcatttgaaccgaccaacattaagtccagagagtaaacttgaatggaataacgacattccagaagttaatcatttgaattctgaacactggagaaaaaccgaaaaatggacggggcatgaagagactaatcatctggaaaccgatttcagtggcgatggcatgacagagctagagctcgggcccagccccaggctgcagcccattcgcaggcacccgaaagaacttccccagtatggtggtcctggaaaggacatttttgaagatcaactatatcttcctgtgcattccgatggaatttcagttcatcagatgttcaccatggccaccgcagaacaccgaagtaattccagcatagcggggaagatgttgaccaaggtggagaagaatcacgaaaaggagaagtcacagcacctagaaggcagcgcctcctcttcactctcctctgattagatgaaactgttaccttaccctaaacacagtatttctttttaacttttttatttgtaaactaataaaggtaatcacagccaccaacattccaagctaccctgggtacctttgtgcagtagaagctagtgagcatgtgagcaagcggtgtgcacacggagactcatcgttataatttactatctgccaagagtagaaagaaaggctggggatatttgggttggcttggttttgattttttgcttgtttgtttgttttgtactaaaacagtattatcttttgaatatcgtagggacataagtatatacatgttatccaatcaagatggctagaatggtgcctttctgagtgtctaaaacttgacacccctggtaaatctttcaacacacttccactgcctgcgtaatgaagttttgattcatttttaaccactggaatttttcaatgccgtcattttcagttagatgattttgcactttgagattaaaatgccatgtctatttgattagtcttatttttttatttttacaggcttatcagtctcactgttggctgtcattgtgacaaagtcaaataaacccccaaggacgacacacagtatggatcacatattgtttgacattaagcttttgccagaaaatgttgcatgtgttttacctcgacttgctaaaatcgattagcagaaaggcatggctaataatgttggtggtgaaaataaataaataagtaaacaaaatgaagattgcctgctctctctgtgcctagcctcaaagcgttcatcatacatcatacctttaagattgctatattttgggttattttcttgacaggagaaaaagatctaaagatcttttattttcatcttttttggttttcttggcatgactaagaagcttaaatgttgataaaatatgactagttttgaatttacaccaagaacttctcaataaaagaaaatcatgaatgctccacaatttcaacataccacaagagaagttaatttcttaacattgtgttctatgattatttgtaagaccttcaccaagttctgatatcttttaaagacatagttcaaaattgcttttgaaaatctgtattcttgaaaatatccttgttgtgtattaggtttttaaataccagctaaaggattacctcactgagtcatcagtaccctcctattcagctccccaagatgatgtgtttttgcttaccctaagagaggttttcttcttatttttagataattcaagtgcttagataaattatgttttctttaagtgtttatggtaaactcttttaaagaaaatttaatatgttatagctgaatctttttggtaactttaaatctttatcatagactctgtacatatgttcaaattagctgcttgcctgatgtgtgtatcatcggtgggatgacagaacaaacatatttatgatcatgaataatgtgctttgtaaaaagatttcaagttattaggaagcatactctgttttttaatcatgtataatattccatgatacttttatagaacaattctggcttcaggaaagtctagaagcaatatttcttcaaataaaaggtgtttaaactttaaaaaaaaaaaaaaaaaaaaaaaaaaaaaaaa

SEQ ID NO: 2 - DNA, 2616 bp, Homo sapiens
atgaagtattcttgctgtgctctggttttggctgtcctgggcacagaattgctgggaagcctctgttcgactgtcagatccccgaggttcagaggacggatacagcaggaacgaaaaaacatccgacccaacattattcttgtgcttaccgatgatcaagatgtggagctggggtccctgcaagtcatgaacaaaacgagaaagattatggaacatgggggggccaccttcatcaatgcctttgtgactacacccatgtgctgcccgtcacggtcctccatgctcaccgggaagtatgtgcacaatcacaatgtctacaccaacaacgagaactgctcttccccctcgtggcaggccatgcatgagcctcggacttttgctgtatatcttaacaacactggctacagaacagccttttttggaaaatacctcaatgaatataatggcagctacatcccccctgggtggcgagaatggcttggattaatcaagaattctcgcttctataattacactgtttgtcgcaatggcatcaaagaaaagcatggatttgattatgcaaaggactacttcacagacttaatcactaacgagagcattaattacttcaaaatgtctaagagaatgtatccccataggcccgttatgatggtgatcagccacgctgcgccccacggccccgaggactcagccccacagttttctaaactgtaccccaatgcttcccaacacataactcctagttataactatgcaccaaatatggataaacactggattatgcagtacacaggaccaatgctgcccatccacatggaatttacaaacattctacagcgcaaaaggctccagactttgatgtcagtggatgattctgtggagaggctgtataacatgctcgtggagacgggggagctggagaatacttacatcatttacaccgccgaccatggttaccatattgggcagtttggactggtcaaggggaaatccatgccatatgactttgatattcgtgtgcctttttttattcgtggtccaagtgtagaaccaggatcaatagtcccacagatcgttctcaacattgacttggcccccacgatcctggatattgctgggctcgacacacctcctgatgtggacggcaagtctgtcctcaaacttctggacccagaaaagccaggtaacaggtttcgaacaaacaagaaggccaaaatttggcgtgatacattcctagtggaaagaggcaaatttctacgtaagaaggaagaatccagcaagaatatccaacagtcaaatcacttgcccaaatatgaacgggtcaaagaactatgccagcaggccaggtaccagacagcctgtgaacaaccggggcagaagtggcaatgcattgaggatacatctggcaagcttcgaattcacaagtgtaaaggacccagtgacctgctcacagtccggcagagcacgcggaacctctacgctcgcggcttccatgacaaagacaaagagtgcagttgtagggagtctggttaccgtgccagcagaagccaaagaaagagtcaacggcaattcttgagaaaccaggggactccaaagtacaagcccagatttgtccatactcggcagacacgttccttgtccgtcgaatttgaaggtgaaatatatgacataaatctggaagaagaagaagaattgcaagtgttgcaaccaagaaacattgctaagcgtcatgatgaaggccacaaggggccaagagatctccaggcttccagtggtggcaacaggggcaggatgctggcagatagcagcaacgccgtgggcccacctaccactgtccgagtgacacacaagtgttttattcttcccaatgactctatccattgtgagagagaactgtaccaatcggccagagcgtggaaggaccataaggcatacattgacaaagagattgaagctctgcaagataaaattaagaatttaagagaagtgagaggacatctgaagagaaggaagcctgaggaatgtagctgcagtaaacaaagctattacaataaagagaaaggtgtaaaaaagcaagagaaattaaagagccatcttcacccattcaaggaggctgctcaggaagtagatagcaaactgcaacttttcaaggagaacaaccgtaggaggaagaaggagaggaaggagaagagacggcagaggaagggggaagagtgcagcctgcctggcctcacttgcttcacgcatgacaacaaccactggcagacagccccgttctggaacctgggatctttctgtgcttgcacgagttctaacaataacacctactggtgtttgcgtacagttaatgagacgcataattttcttttctgtgagtttgctactggctttttggagtattttgatatgaatacagatccttatcagctcacaaatacagtgcacacggtagaacgaggcattttgaatcagctacacgtacaactaatggagctcagaagctgtcaaggatataagcagtgcaacccaagacctaagaatcttgatgttggaaataaagatggaggaagctatgacctacacagaggacagttatgggatggatgggaaggttaa

SEQ ID NO: 3 - protein, 871 aa, Homo sapiens
MKYSCCALVLAVLGTELLGSLCSTVRSPRFRGRIQQERKNIRPNIILVLTDDQDVELGSLQVMNKTRKIMEHGGATFINAFVTTPMCCPSRSSMLTGKYVHNHNVYTNNENCSSPSWQAMHEPRTFAVYLNNTGYRTAFFGKYLNEYNGSYIPPGWREWLGLIKNSRFYNYTVCRNGIKEKHGFDYAKDYFTDLITNESINYFKMSKRMYPHRPVMMVISHAAPHGPEDSAPQFSKLYPNASQHITPSYNYAPNMDKHWIMQYTGPMLPIHMEFTNILQRKRLQTLMSVDDSVERLYNMLVETGELENTYIIYTADHGYHIGQFGLVKGKSMPYDFDIRVPFFIRGPSVEPGSIVPQIVLNIDLAPTILDIAGLDTPPDVDGKSVLKLLDPEKPGNRFRTNKKAKIWRDTFLVERGKFLRKKEESSKNIQQSNHLPKYERVKELCQQARYQTACEQPGQKWQCIEDTSGKLRIHKCKGPSDLLTVRQSTRNLYARGFHDKDKECSCRESGYRASRSQRKSQRQFLRNQGTPKYKPRFVHTRQTRSLSVEFEGEIYDINLEEEEELQVLQPRNIAKRHDEGHKGPRDLQASSGGNRGRMLADSSNAVGPPTTVRVTHKCFILPNDSIHCERELYQSARAWKDHKAYIDKEIEALQDKIKNLREVRGHLKRRKPEECSCSKQSYYNKEKGVKKQEKLKSHLHPFKEAAQEVDSKLQLFKENNRRRKKERKEKRRQRKGEECSLPGLTCFTHDNNHWQTAPFWNLGSFCACTSSNNNTYWCLRTVNETHNFLFCEFATGFLEYFDMNTDPYQLTNTVHTVERGILNQLHVQLMELRSCQGYKQCNPRPKNLDVGNKDGGSYDLHRGQLWDGWEG

SEQ ID NO: 4 - DNA, 3363 bp, Homo sapiens
gactcccgcatcccaaaagaagcaccagatcagcaaaaaaagaagatgggccccccgagcctcgtgctgtgcttgctgtccgcaactgtgttctccctgctgggtggaagctcggccttcctgtcgcaccaccgcctgaaaggcaggtttcagagggaccgcaggaacatccgccccaacatcatcctggtgctgacggacgaccaggatgtggagctgggttccatgcaggtgatgaacaagacccggcgcatcatggagcagggcggggcgcacttcatcaacgccttcgtgaccacacccatgtgctgcccctcacgctcctccatcctcactggcaagtacgtccacaaccacaacacctacaccaacaatgagaactgctcctcgccctcctggcaggcacagcacgagagccgcacctttgccgtgtacctcaatagcactggctaccggacagctttcttcgggaagtatcttaatgaatacaacggctcctacgtgccacccggctggaaggagtgggtcggactccttaaaaactcccgcttttataactacacgctgtgtcggaacggggtgaaagaaaagcacggctccgactactccaaggattacctcacagacctcatcaccaatgacagcgtgagcttcttccgcacgtccaagaagatgtacccgcacaggccagtcctcatggtcatcagccatgcagccccccacggccctgaggattcagccccacaatattcacgcctcttcccaaacgcatctcagcacatcacgccgagctacaactacgcgcccaacccggacaaacactggatcatgcgctacacggggcccatgaagcccatccacatggaattcaccaacatgctccagcggaagcgcttgcagaccctcatgtcggtggacgactccatggagacgatttacaacatgctggttgagacgggcgagctggacaacacgtacatcgtatacaccgccgaccacggttaccacatcggccagtttggcctggtgaaagggaaatccatgccatatgagtttgacatcagggtcccgttctacgtgaggggccccaacgtggaagccggctgtctgaatccccacatcgtcctcaacattgacctggcccccaccatcctggacattgcaggcctggacatacctgcggatatggacgggaaatccatcctcaagctgctggacacggagcggccggtgaatcggtttcacttgaaaaagaagatgagggtctggcgggactccttcttggtggagagaggcaagctgctacacaagagagacaatgacaaggtggacgcccaggaggagaactttctgcccaagtaccagcgtgtgaaggacctgtgtcagcgtgctgagtaccagacggcgtgtgagcagctgggacagaagtggcagtgtgtggaggacgccacggggaagctgaagctgcataagtgcaagggccccatgcggctgggcggcagcagagccctctccaacctcgtgcccaagtactacgggcagggcagcgaggcctgcacctgtgacagcggggactacaagctcagcctggccggacgccggaaaaaactcttcaagaagaagtacaaggccagctatgtccgcagtcgctccatccgctcagtggccatcgaggtggacggcagggtgtaccacgtaggcctgggtgatgccgcccagccccgaaacctcaccaagcggcactggccaggggcccctgaggaccaagatgacaaggatggtggggacttcagtggcactggaggccttcccgactactcagccgccaaccccattaaagtgacacatcggtgctacatcctagagaacgacacagtccagtgtgacctggacctgtacaagtccctgcaggcctggaaagaccacaagctgcacatcgaccacgagattgaaaccctgcagaacaaaattaagaacctgagggaagtccgaggtcacctgaagaaaaagcggccagaagaatgtgactgtcacaaaatcagctaccacacccagcacaaaggccgcctcaagcacagaggctccagtctgcatcctttcaggaagggcctgcaagagaaggacaaggtgtggctgttgcgggagcagaagcgcaagaagaaactccgcaagctgctcaagcgcctgcagaacaacgacacgtgcagcatgccaggcctcacgtgcttcacccacgacaaccagcactggcagacggcgcctttctggacactggggcctttctgtgcctgcaccagcgccaacaataacacgtactggtgcatgaggaccatcaatgagactcacaatttcctcttctgtgaatttgcaactggcttcctagagtactttgatctcaacacagacccctaccagctgatgaatgcagtgaacacactggacagggatgtcctcaaccagctacacgtacagctcatggagctgaggagctgcaagggttacaagcagtgtaacccccggactcgaaacatggacctgggacttaaagatggaggaagctatgagcaatacaggcagtttcagcgtcgaaagtggccagaaatgaagagaccttcttccaaatcactgggacaactgtgggaaggctgggaaggttaagaaacaacagaggtggacctccaaaaacatagaggcatcacctgactgcacaggcaatgaaaaaccatgtgggtgatttccagcagacctgtgctattggccaggaggcctgagaaagcaagcacgcactctcagtcaacatgacagattctggaggataaccagcaggagcagagataacttcaggaagtccatttttgcccctgcttttgctttggattatacctcaccagctgcacaaaatgcattttttcgtatcaaaaagtcaccactaaccctcccccagaagctcacaaaggaaaacggagagagcgagcgagagagatttccttggaaatttctcccaagggcgaaagtcattggaatttttaaatcataggggaaaagcagtcctgttctaaatcctcttattcttttggtttgtcacaaagaaggaactaagaagcaggacagaggcaacgtggagaggctgaaaacagtgcagagacgtttgacaatgagtcagtagcacaaaagagatgacatttacctagcactataaaccctggttgcctctgaagaaactgccttcattgtatatatgtgactatttacatgtaatcaacatgggaacttttaggggaacctaataagaaatcccaattttcaggagtggtggtgtcaataaacgctctgtggccagtgtaaaagaaaaaaaaaaaaaaa

SEQ ID NO: 5 - DNA, 2616 bp, Homo sapiens
tgaatgggccccccgagcctcgtgctgtgcttgctgtccgcaactgtgttctccctgctgggtggaagctcggccttcctgtcgcaccaccgcctgaaaggcaggtttcagagggaccgcaggaacatccgccccaacatcatcctggtgctgacggacgaccaggatgtggagctgggttccatgcaggtgatgaacaagacccggcgcatcatggagcagggcggggcgcacttcatcaacgccttcgtgaccacacccatgtgctgcccctcacgctcctccatcctcactggcaagtacgtccacaaccacaacacctacaccaacaatgagaactgctcctcgccctcctggcaggcacagcacgagagccgcacctttgccgtgtacctcaatagcactggctaccggacagctttcttcgggaagtatcttaatgaatacaacggctcctacgtgccacccggctggaaggagtgggtcggactccttaaaaactcccgcttttataactacacgctgtgtcggaacggggtgaaagaaaagcacggctccgactactccaaggattacctcacagacctcatcaccaatgacagcgtgagcttcttccgcacgtccaagaagatgtacccgcacaggccagtcctcatggtcatcagccatgcagccccccacggccctgaggattcagccccacaatattcacgcctcttcccaaacgcatctcagcacatcacgccgagctacaactacgcgcccaacccggacaaacactggatcatgcgctacacggggcccatgaagcccatccacatggaattcaccaacatgctccagcggaagcgcttgcagaccctcatgtcggtggacgactccatggagacgatttacaacatgctggttgagacgggcgagctggacaacacgtacatcgtatacaccgccgaccacggttaccacatcggccagtttggcctggtgaaagggaaatccatgccatatgagtttgacatcagggtcccgttctacgtgaggggccccaacgtggaagccggctgtctgaatccccacatcgtcctcaacattgacctggcccccaccatcctggacattgcaggcctggacatacctgcggatatggacgggaaatccatcctcaagctgctggacacggagcggccggtgaatcggtttcacttgaaaaagaagatgagggtctggcgggactccttcttggtggagagaggcaagctgctacacaagagagacaatgacaaggtggacgcccaggaggagaactttctgcccaagtaccagcgtgtgaaggacctgtgtcagcgtgctgagtaccagacggcgtgtgagcagctgggacagaagtggcagtgtgtggaggacgccacggggaagctgaagctgcataagtgcaagggccccatgcggctgggcggcagcagagccctctccaacctcgtgcccaagtactacgggcagggcagcgaggcctgcacctgtgacagcggggactacaagctcagcctggccggacgccggaaaaaactcttcaagaagaagtacaaggccagctatgtccgcagtcgctccatccgctcagtggccatcgaggtggacggcagggtgtaccacgtaggcctgggtgatgccgcccagccccgaaacctcaccaagcggcactggccaggggcccctgaggaccaagatgacaaggatggtggggacttcagtggcactggaggccttcccgactactcagccgccaaccccattaaagtgacacatcggtgctacatcctagagaacgacacagtccagtgtgacctggacctgtacaagtccctgcaggcctggaaagaccacaagctgcacatcgaccacgagattgaaaccctgcagaacaaaattaagaacctgagggaagtccgaggtcacctgaagaaaaagcggccagaagaatgtgactgtcacaaaatcagctaccacacccagcacaaaggccgcctcaagcacagaggctccagtctgcatcctttcaggaagggcctgcaagagaaggacaaggtgtggctgttgcgggagcagaagcgcaagaagaaactccgcaagctgctcaagcgcctgcagaacaacgacacgtgcagcatgccaggcctcacgtgcttcacccacgacaaccagcactggcagacggcgcctttctggacactggggcctttctgtgcctgcaccagcgccaacaataacacgtactggtgcatgaggaccatcaatgagactcacaatttcctcttctgtgaatttgcaactggcttcctagagtactttgatctcaacacagacccctaccagctgatgaatgcagtgaacacactggacagggatgtcctcaaccagctacacgtacagctcatggagctgaggagctgcaagggttacaagcagtgtaacccccggactcgaaacatggacctgggacttaaagatggaggaagctatgagcaatacaggcagtttcagcgtcgaaagtggccagaaatgaagagaccttcttccaaatcactgggacaactgtgggaaggctgggaaggttaa

SEQ ID NO: 6 - protein, 870 aa, Homo sapiens
MGPPSLVLCLLSATVFSLLGGSSAFLSHHRLKGRFQRDRRNIRPNIILVLTDDQDVELGSMQVMNKTRRIMEQGGAHFINAFVTTPMCCPSRSSILTGKYVHNHNTYTNNENCSSPSWQAQHESRTFAVYLNSTGYRTAFFGKYLNEYNGSYVPPGWKEWVGLLKNSRFYNYTLCRNGVKEKHGSDYSKDYLTDLITNDSVSFFRTSKKMYPHRPVLMVISHAAPHGPEDSAPQYSRLFPNASQHITPSYNYAPNPDKHWIMRYTGPMKPIHMEFTNMLQRKRLQTLMSVDDSMETIYNMLVETGELDNTYIVYTADHGYHIGQFGLVKGKSMPYEFDIRVPFYVRGPNVEAGCLNPHIVLNIDLAPTILDIAGLDIPADMDGKSILKLLDTERPVNRFHLKKKMRVWRDSFLVERGKLLHKRDNDKVDAQEENFLPKYQRVKDLCQRAEYQTACEQLGQKWQCVEDATGKLKLHKCKGPMRLGGSRALSNLVPKYYGQGSEACTCDSGDYKLSLAGRRKKLFKKKYKASYVRSRSIRSVAIEVDGRVYHVGLGDAAQPRNLTKRHWPGAPEDQDDKDGGDFSGTGGLPDYSAANPIKVTHRCYILENDTVQCDLDLYKSLQAWKDHKLHIDHEIETLQNKIKNLREVRGHLKKKRPEECDCHKISYHTQHKGRLKHRGSSLHPFRKGLQEKDKVWLLREQKRKKKLRKLLKRLQNNDTCSMPGLTCFTHDNQHWQTAPFWTLGPFCACTSANNNTYWCMRTINETHNFLFCEFATGFLEYFDLNTDPYQLMNAVNTLDRDVLNQLHVQLMELRSCKGYKQCNPRTRNMDLGLKDGGSYEQYRQFQRRKWPEMKRPSSKSLGQLWEGWEG

SEQ ID NO: 7 - DNA, 3469 bp, Mus musculus
cttcaccttgagaaggtgaatttccctaaagacatgcagtttcttcaagccagaatccttgcagggaaccttcaaaggactccttctgcagatgttttggaaacctctgagtctagaaatcgattattcacccaggataccttattcaagctcccagaactcacccgaccaaggagcttggaagactttgcaactttggaccaagcacaatgaagtattccctctgggctctgctgcttcccctgctgggcacacagctgctgggaaccctgtgttccaccgttcggtcccagaggttccgaggaaggatacagcaggaacgaaaaaacatccgacccaacattattcttgtgcttaccgatgatcaagatgtggagctggggtccctgcaagtcatgaacaaaacgagaaagattatggaacatgggggggccaccttcatcaatgcctttgtgactacacccatgtgctgcccgtcacggtcctccatgctcaccgggaagtatgtgcacaatcacaatgtctacaccaacaacgagaactgctcttccccctcgtggcaggccatgcatgagcctcggacttttgctgtatatcttaacaacactggctacagaacagccttttttggaaaatacctcaatgaatataatggcagctacatcccccctgggtggcgagaatggcttggattaatcaagaattctcgcttctataattacactgtttgtcgcaatggcatcaaagaaaagcatggatttgattatgcaaaggactacttcacagacttaatcactaacgagagcattaattacttcaaaatgtctaagagaatgtatccccataggcccgttatgatggtgatcagccacgctgcgccccacggccccgaggactcagccccacagttttctaaactgtaccccaatgcttcccaacacataactcctagttataactatgcaccaaatatggataaacactggattatgcagtacacaggaccaatgctgcccatccacatggaatttacaaacattctacagcgcaaaaggctccagactttgatgtcagtggatgattctgtggagaggctgtataacatgctcgtggagacgggggagctggagaatacttacatcatttacaccgccgaccatggttaccatattgggcagtttggactggtcaaggggaaatccatgccatatgactttgatattcgtgtgcctttttttattcgtggtccaagtgtagaaccaggatcaatagtcccacagatcgttctcaacattgacttggcccccacgatcctggatattgctgggctcgacacacctcctgatgtggacggcaagtctgtcctcaaacttctggacccagaaaagccaggtaacaggtttcgaacaaacaagaaggccaaaatttggcgtgatacattcctagtggaaagaggcaaatttctacgtaagaaggaagaatccagcaagaatatccaacagtcaaatcacttgcccaaatatgaacgggtcaaagaactatgccagcaggccaggtaccagacagcctgtgaacaaccggggcagaagtggcaatgcattgaggatacatctggcaagcttcgaattcacaagtgtaaaggacccagtgacctgctcacagtccggcagagcacgcggaacctctacgctcgcggcttccatgacaaagacaaagagtgcagttgtagggagtctggttaccgtgccagcagaagccaaagaaagagtcaacggcaattcttgagaaaccaggggactccaaagtacaagcccagatttgtccatactcggcagacacgttccttgtccgtcgaatttgaaggtgaaatatatgacataaatctggaagaagaagaagaattgcaagtgttgcaaccaagaaacattgctaagcgtcatgatgaaggccacaaggggccaagagatctccaggcttccagtggtggcaacaggggcaggatgctggcagatagcagcaacgccgtgggcccacctaccactgtccgagtgacacacaagtgttttattcttcccaatgactctatccattgtgagagagaactgtaccaatcggccagagcgtggaaggaccataaggcctacattgataaagagattgaagttctacaagataaaattaagaatttaagggaagtgaggggacacctaaagaaaaggaaacctgaggagtgtagctgtggtgaccagagctattacaacaaagagaaaggtgtcaaacgacaggagaagctaaagagtcaccttcaccccttcaaggaggctgctgcccaggaggtggatagcaaacttcagctcttcaaggagcatcggaggaggaagaaggagaggaaggagaagaaacggcagaggaagggagaggagtgtagcctgcctggccttacctgcttcacccatgacaacaaccactggcagactgccccattctggaacttgggatctttctgtgcctgcacaagttctaacaacaatacctactgggtgttgcgtacagtcaacgagacgcacaatttcctgttttgtgagtttgctactggctttctggaatatttcgacatgaatacggatccttatcagctcacaaatacagtacacacagtagaacgaggcattttgaatcagctacacgtacaactaatggagctcagaagctgtcaaggatataagcagtgcaacccaagacctaagaatcttgatgttggaaataaagatggaggaaactatgacccgcacagaggacagttatgggatggatgggaaggttagtctttccaatgttacttcagacaccagctggcaaggcctggaggagttatccggtgcaagcgacatcgatgagtacaggtctaaccctagactaagtctggaggactggactaactacctgagggctgtctacagagcctttgcactgctgaacagtcaccctgatccaaacaaagcaaatgggactccaaccacacaaggtggtgacttcctggtcacctctgctgagcgcttggtgccagcagagatggcttctgcagaatcaggtgaagacccaagtcatgtggttggggaaacacctcctttgaccttgccagtcaacctccaaaccctgcatctgaacagaccaacgttaagtccagagagaaaacttgaatgggataatgacattccagaagtgaatcatttgaattctgaacactggagaaaaactgagaagcagataggatgggaggagctgcatcatcctgaaggtgacgtcgtcagtggcaatggtatgacagagctgctgccccagtctcatcttgggcatcagctcaccagtcagcaccaacaaaaatgttcccaggatgtggagacagagaaggatgcttttgaagatcaattgcgtcctcttgtccactctgacagaactccggttcatc

SEQ ID NO: 8 - DNA, 2616 bp, Mus musculus
atgaagtattccctctgggctctgctgcttcccctgctgggcacacagctgctgggaaccctgtgttccaccgttcggtcccagaggttccgaggaaggatacagcaggaacgaaaaaacatccgacccaacattattcttgtgcttaccgatgatcaagatgtggagctggggtccctgcaagtcatgaacaaaacgagaaagattatggaacatgggggggccaccttcatcaatgcctttgtgactacacccatgtgctgcccgtcacggtcctccatgctcaccgggaagtatgtgcacaatcacaatgtctacaccaacaacgagaactgctcttccccctcgtggcaggccatgcatgagcctcggacttttgctgtatatcttaacaacactggctacagaacagccttttttggaaaatacctcaatgaatataatggcagctacatcccccctgggtggcgagaatggcttggattaatcaagaattctcgcttctataattacactgtttgtcgcaatggcatcaaagaaaagcatggatttgattatgcaaaggactacttcacagacttaatcactaacgagagcattaattacttcaaaatgtctaagagaatgtatccccataggcccgttatgatggtgatcagccacgctgcgccccacggccccgaggactcagccccacagttttctaaactgtaccccaatgcttcccaacacataactcctagttataactatgcaccaaatatggataaacactggattatgcagtacacaggaccaatgctgcccatccacatggaatttacaaacattctacagcgcaaaaggctccagactttgatgtcagtggatgattctgtggagaggctgtataacatgctcgtggagacgggggagctggagaatacttacatcatttacaccgccgaccatggttaccatattgggcagtttggactggtcaaggggaaatccatgccatatgactttgatattcgtgtgcctttttttattcgtggtccaagtgtagaaccaggatcaatagtcccacagatcgttctcaacattgacttggcccccacgatcctggatattgctgggctcgacacacctcctgatgtggacggcaagtctgtcctcaaacttctggacccagaaaagccaggtaacaggtttcgaacaaacaagaaggccaaaatttggcgtgatacattcctagtggaaagaggcaaatttctacgtaagaaggaagaatccagcaagaatatccaacagtcaaatcacttgcccaaatatgaacgggtcaaagaactatgccagcaggccaggtaccagacagcctgtgaacaaccggggcagaagtggcaatgcattgaggatacatctggcaagcttcgaattcacaagtgtaaaggacccagtgacctgctcacagtccggcagagcacgcggaacctctacgctcgcggcttccatgacaaagacaaagagtgcagttgtagggagtctggttaccgtgccagcagaagccaaagaaagagtcaacggcaattcttgagaaaccaggggactccaaagtacaagcccagatttgtccatactcggcagacacgttccttgtccgtcgaatttgaaggtgaaatatatgacataaatctggaagaagaagaagaattgcaagtgttgcaaccaagaaacattgctaagcgtcatgatgaaggccacaaggggccaagagatctccaggcttccagtggtggcaacaggggcaggatgctggcagatagcagcaacgccgtgggcccacctaccactgtccgagtgacacacaagtgttttattcttcccaatgactctatccattgtgagagagaactgtaccaatcggccagagcgtggaaggaccataaggcctacattgataaagagattgaagttctacaagataaaattaagaatttaagggaagtgaggggacacctaaagaaaaggaaacctgaggagtgtagctgtggtgaccagagctattacaacaaagagaaaggtgtcaaacgacaggagaagctaaagagtcaccttcaccccttcaaggaggctgctgcccaggaggtggatagcaaacttcagctcttcaaggagcatcggaggaggaagaaggagaggaaggagaagaaacggcagaggaagggagaggagtgtagcctgcctggccttacctgcttcacccatgacaacaaccactggcagactgccccattctggaacttgggatctttctgtgcctgcacaagttctaacaacaatacctactgggtgttgcgtacagtcaacgagacgcacaatttcctgttttgtgagtttgctactggctttctggaatatttcgacatgaatacggatccttatcagctcacaaatacagtacacacagtagaacgaggcattttgaatcagctacacgtacaactaatggagctcagaagctgtcaaggatataagcagtgcaacccaagacctaagaatcttgatgttggaaataaagatggaggaaactatgacccgcacagaggacagttatgggatggatgggaaggttag

SEQ ID NO: 9 - protein, 232 aa, Mus musculus
MKYSLWALLLPLLGTQLLGTLCSTVRSQRFRGRIQQEAWKDHKAYIDKEIEVLQDKIKNLREVRGHLKKRKPEECSCGDQSYYNKEKGVKRQEKLKSHLHPFKEAAAQEVDSKLQLFKEHRRRKKERKEKKRQRKGEECSLPGLTCFTHDNNHWQTAPFWNLGSFCACTSSNNNTYWVLRTVNETHNFLFCEFATGFLEYFDMNTDPYQLTNTVHTVNYDPHRGQLWDGWEG

SEQ ID NO: 10 - DNA, 3766 bp, Mus musculus
ggacgcgtgggcggacgcgtggggtctgggcaacgcttctgctttcgcttgagctcaacttaatttctcagagagcttcggagacgcgtgggaaggtcccaggcgcgtgggcagttcctcccgcgatctagcttggggatcggcccgagccggcgtctccaatgatcctgagggaagaggggaaggaatcccatcctcacgacaccacctcggcctctgcatccaggaagaagcaaaggaccagcaagccacgccaatggcaccccctggcctgccactatggctgctgtccaccgctctcctctccctgctggctggcagctcggccttcctctcccatccccgcctgaagggacgcttccagagggaccgcaggaacatccggcccaacatcatcttggtgcttacggatgaccaggatgtggagctgggctccatgcaagtgatgaacaagacaaggcgtatcatggagcagggcggggcgcacttcatcaatgccttcgtgactacaccaatgtgctgtccgtctcgctcctccattctcaccggcaagtacgtccacaaccacaacacctacaccaacaatgagaattgttcctcgccctcctggcaggcccagcacgagagccgcaccttcgccgtgtatctcaacagcacaggctaccggacagctttcttcggaaaatacctcaatgagtacaacggctcatacgtgccgcccggctggaaggagtgggtcggcctacttaagaactcccgcttttataactacacactctgccggaatggggtgaaggagaaacatggctcagactactccacggattacctcacggatctcatcaccaatgacagtgtgagcttcttccgaacatccaagaagatgtacccacacaggcccgtgctcatggtcatcagccacgcggctccccacggccccgaggactcggcaccgcagtactcacggctcttccccaatgcgtcccagcacatcacaccgagttacaactatgcacccaacccagacaagcattggatcatgcgctacacgggacccatgaagcccattcacatggaattcaccaacatgctacaacgcaaacgcctacagaccctcatgtctgtggatgactccatggagacgatctatgacatgctggtggagacgggggagctggacaacacgtacatcctgtacaccgccgaccacggctaccacattggccagtttgggctggtgaagggcaagtctatgccgtatgaattcgacatcagagtcccgttctacgtgaggggccccaacgtggaagctggctctctgaacccccacattgtcctcaacattgacctggcccccaccatactggatatcgctggactggacatccctgcagacatggacgggaagtctattctcaaactactggactcagagcggccagtgaaccggttccacttgaaaaagaagctgagggtctggcgagactccttcctggtggagagaggcaaactgctccacaagagggagggtgacaaagtgaatgcccaggaggagaacttcctgcccaagtaccagcgcgtgaaggacctgtgtcagcgagctgagtaccagacagcatgcgaacagctggggcagaagtggcagtgtgtggaggacgcttctgggacgctgaagctgcacaaatgtaaaggccccatgcggtttggtggcggcggtggcagcagagccctctccaacctggtgcccaagtatgacggccagagcagcgaggcctgcagctgtgacagtggcggtggaggggactacaaactgggcctggctggacgccgtaagctctttaagaaaaagtataagaccagctatgcccggaaccgctccatccgttccgtggccatcgaggtggacggtgagatataccacgtaggcttggatactgtgcctcagccccgcaaccttagcaagccgcactggccaggggcccctgaagaccaagatgacaaggatggtggcagtttcagtggtactggtggccttccagattattctgcccccaatcccatcaaagtgacccatcggtgctacatccttgagaatgacacagtccagtgcgacttggacctgtacaagtccctgcaggcttggaaagaccacaagctgcacatcgaccatgagatcgaaaccctgcagaacaaaattaagaaccttcgagaagtcaggggtcacctgaagaagaagcgaccggaagaatgtgactgccataaaatcagttaccacagccaacacaaaggccgtctcaagcacaaaggctccagcctgcaccctttcaggaagggtctgcaggagaaggacaaggtgtggctgctgcgggagcagaaacgcaagaagaaactgcgcaagctgctcaaacggctgcagaacaacgatacgtgcagcatgcccggcctcacgtgctttacccacgacaaccaccactggcagacggcgccactctggacgctggggccgttctgcgcctgcaccagcgccaacaacaacacgtactggtgcttgaggaccataaatgagacccacaacttcctcttctgcgaatttgcaaccggcttcatagaatactttgacctcagtacagacccctaccagctgatgaacgcggtgaacacactggacagggacgtccttaaccaactgcacgtgcagctcatggagctaaggagctgtaaaggctacaagcagtgcaacccccggacccgcaacatggacctggggcttagagacggaggaagctatgaacaatacaggcagtttcagcgtcgaaaatggccagaaatgaagagaccttcttccaaatcactgggacagctatgggaaggttgggaaggctaagcggccatagagagaggaacctccaaaaccaggggcctcgtgtggctgcccaggccatgcaaaaaacacccgattcccagaagatgaatgttggaactgggagacctgacagaaggcagggctgctcttgggacaggaaatcctggaggacagcgcctggactttccgatgctcagtttctttgccctgctttgctctggatcaaacctcactggctgctctgggatgcgtgctcacacctggagtctctgctcaccctttcagaggctcacaaagacaaaggaactaatttccatggacacttcctccagagatggaaattgctgggattcgcccactcctcccctgcacccctcccccagtcatctagggaagcaagcttgttttaaccttcttactctttggagaaagcacggacatcccaggtgctgtcaacctcacagtcttgacaaagtctatagcacaaaacagtaccattcaccaggctggttgacctggctggctcagaagctgccttcaccacatacatgaccgctcacacgtaaccaacacagggaattgtaggggaatctcactaatatgaaatcccgcttttcaagagtcgcggtgtcaataaacgctgtggctaggatcaaggataatcccttgagctttcagacatttattcctgcccgggattcgttcctttgttatccatcccagaactgatgtttttctaaggtaccgaaaccccaagttgatgtgtgtcctgtgttttaatgacattgtatttgtaaagttttgtagtataagtaccatcttacagtgttcctgcccccagccaatgtctagctattggtatgaaaaaaaaaaatctttgaatttttgtaaaaaaaaaaaaaa

SEQ ID NO: 11 - DNA, 2628 bp, Mus musculus
atggcaccccctggcctgccactatggctgctgtccaccgctctcctctccctgctggctggcagctcggccttcctctcccatccccgcctgaagggacgcttccagagggaccgcaggaacatccggcccaacatcatcttggtgcttacggatgaccaggatgtggagctgggctccatgcaagtgatgaacaagacaaggcgtatcatggagcagggcggggcgcacttcatcaatgccttcgtgactacaccaatgtgctgtccgtctcgctcctccattctcaccggcaagtacgtccacaaccacaacacctacaccaacaatgagaattgttcctcgccctcctggcaggcccagcacgagagccgcaccttcgccgtgtatctcaacagcacaggctaccggacagctttcttcggaaaatacctcaatgagtacaacggctcatacgtgccgcccggctggaaggagtgggtcggcctacttaagaactcccgcttttataactacacactctgccggaatggggtgaaggagaaacatggctcagactactccacggattacctcacggatctcatcaccaatgacagtgtgagcttcttccgaacatccaagaagatgtacccacacaggcccgtgctcatggtcatcagccacgcggctccccacggccccgaggactcggcaccgcagtactcacggctcttccccaatgcgtcccagcacatcacaccgagttacaactatgcacccaacccagacaagcattggatcatgcgctacacgggacccatgaagcccattcacatggaattcaccaacatgctacaacgcaaacgcctacagaccctcatgtctgtggatgactccatggagacgatctatgacatgctggtggagacgggggagctggacaacacgtacatcctgtacaccgccgaccacggctaccacattggccagtttgggctggtgaagggcaagtctatgccgtatgaattcgacatcagagtcccgttctacgtgaggggccccaacgtggaagctggctctctgaacccccacattgtcctcaacattgacctggcccccaccatactggatatcgctggactggacatccctgcagacatggacgggaagtctattctcaaactactggactcagagcggccagtgaaccggttccacttgaaaaagaagctgagggtctggcgagactccttcctggtggagagaggcaaactgctccacaagagggagggtgacaaagtgaatgcccaggaggagaacttcctgcccaagtaccagcgcgtgaaggacctgtgtcagcgagctgagtaccagacagcatgcgaacagctggggcagaagtggcagtgtgtggaggacgcttctgggacgctgaagctgcacaaatgtaaaggccccatgcggtttggtggcggcggtggcagcagagccctctccaacctggtgcccaagtatgacggccagagcagcgaggcctgcagctgtgacagtggcggtggaggggactacaaactgggcctggctggacgccgtaagctctttaagaaaaagtataagaccagctatgcccggaaccgctccatccgttccgtggccatcgaggtggacggtgagatataccacgtaggcttggatactgtgcctcagccccgcaaccttagcaagccgcactggccaggggcccctgaagaccaagatgacaaggatggtggcagtttcagtggtactggtggccttccagattattctgcccccaatcccatcaaagtgacccatcggtgctacatccttgagaatgacacagtccagtgcgacttggacctgtacaagtccctgcaggcttggaaagaccacaagctgcacatcgaccatgagatcgaaaccctgcagaacaaaattaagaaccttcgagaagtcaggggtcacctgaagaagaagcgaccggaagaatgtgactgccataaaatcagttaccacagccaacacaaaggccgtctcaagcacaaaggctccagcctgcaccctttcaggaagggtctgcaggagaaggacaaggtgtggctgctgcgggagcagaaacgcaagaagaaactgcgcaagctgctcaaacggctgcagaacaacgatacgtgcagcatgcccggcctcacgtgctttacccacgacaaccaccactggcagacggcgccactctggacgctggggccgttctgcgcctgcaccagcgccaacaacaacacgtactggtgcttgaggaccataaatgagacccacaacttcctcttctgcgaatttgcaaccggcttcatagaatactttgacctcagtacagacccctaccagctgatgaacgcggtgaacacactggacagggacgtccttaaccaactgcacgtgcagctcatggagctaaggagctgtaaaggctacaagcagtgcaacccccggacccgcaacatggacctggggcttagagacggaggaagctatgaacaatacaggcagtttcagcgtcgaaaatggccagaaatgaagagaccttcttccaaatcactgggacagctatgggaaggttgggaaggctaa

SEQ ID NO: 12 - protein, 875 aa, Mus musculus
MAPPGLPLWLLSTALLSLLAGSSAFLSHPRLKGRFQRDRRNIRPNIILVLTDDQDVELGSMQVMNKTRRIMEQGGAHFINAFVTTPMCCPSRSSILTGKYVHNHNTYTNNENCSSPSWQAQHESRTFAVYLNSTGYRTAFFGKYLNEYNGSYVPPGWKEWVGLLKNSRFYNYTLCRNGVKEKHGSDYSTDYLTDLITNDSVSFFRTSKKMYPHRPVLMVISHAAPHGPEDSAPQYSRLFPNASQHITPSYNYAPNPDKHWIMRYTGPMKPIHMEFTNMLQRKRLQTLMSVDDSMETIYDMLVETGELDNTYILYTADHGYHIGQFGLVKGKSMPYEFDIRVPFYVRGPNVEAGSLNPHIVLNIDLAPTILDIAGLDIPADMDGKSILKLLDSERPVNRFHLKKKLRVWRDSFLVERGKLLHKREGDKVNAQEENFLPKYQRVKDLCQRAEYQTACEQLGQKWQCVEDASGTLKLHKCKGPMRFGGGGGSRALSNLVPKYDGQSSEACSCDSGGGGDYKLGLAGRRKLFKKKYKTSYARNRSIRSVAIEVDGEIYHVGLDTVPQPRNLSKPHWPGAPEDQDDKDGGSFSGTGGLPDYSAPNPIKVTHRCYILENDTVQCDLDLYKSLQAWKDHKLHIDHEIETLQNKIKNLREVRGHLKKKRPEECDCHKISYHSQHKGRLKHKGSSLHPFRKGLQEKDKVWLLREQKRKKKLRKLLKRLQNNDTCSMPGLTCFTHDNHHWQTAPLWTLGPFCACTSANNNTYWCLRTINETHNFLFCEFATGFIEYFDLSTDPYQLMNAVNTLDRDVLNQLHVQLMELRSCKGYKQCNPRTRNMDLGLRDGGSYEQYRQFQRRKWPEMKRPSSKSLGQLWEGWEG

SEQ ID NO: 13 - DNA, 4286 bp, Homo sapiens
ggcacgagggccatttctggacaacagctgctattttcacttgagcccaagttaatttctcggggagttctcgggcgcgcacaggcagctcggtttgccctgcgattgagctgcgggtcgcggccggcgccggcctctccaatggcaaatgtgtgtggctggaggcgagcgcgaggctttcggcaaaggcagtcgagtgtttgcagaccggggcgagtcctgtgaaagcagataaaagaaaacatttattaacgtgtcattacgaggggagcgcccggccggggctgtcgcactccccgcggaacatttggctccctccagctcctagagaggagaagaagaaagcggaaaagaggcagattcacgtcgtttccagccaagtggacctgatcgatggccctcctgaatttatcacgatatttgatttattagcgatgccccctggtttgtgtgttacgcacacacacgtgcacacaaggctctggctcgcttccctccctcgtttccagctcctgggcgaatcccacatctgtttcaactctccgccgagggcgagcaggagcgagagtgtgtcgaatctgcgagtgaagagggacgagggaaaagaaacaaagccacagacgcaacttgagactcccgcatcccaaaagaagcaccagatcagcaaaaaaagaagatgggccccccgagcctcgtgctgtgcttgctgtccgcaactgtgttctccctgctgggtggaagctcggccttcctgtcgcaccaccgcctgaaaggcaggtttcagagggaccgcaggaacatccgccccaacatcatcctggtgctgacggacgaccaggatgtggagctgggttccatgcaggtgatgaacaagacccggcgcatcatggagcagggcggggcgcacttcatcaacgccttcgtgaccacacccatgtgctgcccctcacgctcctccatcctcaccggcaagtacgtccacaaccacaacacctacaccaacaatgagaactgctcctcgccctcctggcaggcacagcacgagagccgcacctttgccgtgtacctcaatagcactggctaccggacagctttcttcgggaagtatcttaatgaatacaacggctcctacgtgccacccggctggaaggagtgggtcggactccttaaaaactcccgcttttataactacacgctgtgtcggaacggggtgaaagagaagcacggctccgactactccaaggattacctcacagacctcatcaccaatgacagcgtgagcttcttccgcacgtccaagaagatgtacccgcacaggccagtcctcatggtcatcagccatgcagccccccacggccctgaggattcagccccacaatattcacgcctcttcccaaacgcatctcagcacatcacgccgagctacaactacgcgcccaacccggacaaacactggatcatgcgctacacggggcccatgaagcccatccacatggaattcaccaacatgctccagcggaagcgcttgcagaccctcatgtcggtggacgactccatggagacgatttacaacatgctggttgagacgggcgagctggacaacacgtacatcgtatacaccgccgaccacggttaccacatcggccagtttggcctggtgaaagggaaatccatgccatatgagtttgacatcagggtcccgttctacgtgaggggccccaacgtggaagccggctgtctgaatccccacatcgtcctcaacattgacctggcccccaccatcctggacattgcaggcctggacatacctgcggatatggacgggaaatccatcctcaagctgctggacacggagcggccggtgaatcggtttcacttgaaaaagaagatgagggtctggcgggactccttcttggtggagagaggcaagctgctacacaagagagacaatgacaaggtggacgcccaggaggagaactttctgcccaagtaccagcgtgtgaaggacctgtgtcagcgtgctgagtaccagacggcgtgtgagcagctgggacagaagtggcagtgtgtggaggacgccacggggaagctgaagctgcataagtgcaagggccccatgcggctgggcggcagcagagccctctccaacctcgtgcccaagtactacgggcagggcagcgaggcctgcacctgtgacagcggggactacaagctcagcctggccggacgccggaaaaaactcttcaagaagaagtacaaggccagctatgtccgcagtcgctccatccgctcagtggccatcgaggtggacggcagggtgtaccacgtaggcctgggtgatgccgcccagccccgaaacctcaccaagcggcactggccaggggcccctgaggaccaagatgacaaggatggtggggacttcagtggcactggaggccttcccgactactcagccgccaaccccattaaagtgacacatcggtgctacatcctagagaacgacacagtccagtgtgacctggacctgtacaagtccctgcaggcctggaaagaccacaagctgcacatcgaccacgagattgaaaccctgcagaacaaaattaagaacctgagggaagtccgaggtcacctgaagaaaaagcggccagaagaatgtgactgtcacaaaatcagctaccacacccagcacaaaggccgcctcaagcacagaggctccagtctgcatcctttcaggaagggcctgcaagagaaggacaaggtgtggctgttgcgggagcagaagcgcaagaagaaactccgcaagctgctcaagcgcctgcagaacaacgacacgtgcagcatgccaggcctcacgtgcttcacccacgacaaccagcactggcagacggcgcctttctggacactggggcctttctgtgcctgcaccagcgccaacaataacacgtactggtgcatgaggaccatcaatgagactcacaatttcctcttctgtgaatttgcaactggcttcctagagtactttgatctcaacacagacccctaccagctgatgaatgcagtgaacacactggacagggatgtcctcaaccagctacacgtacagctcatggagctgaggagctgcaagggttacaagcagtgtaacccccggactcgaaacatggacctgggacttaaagatggaggaagctatgagcaatacaggcagtttcagcgtcgaaagtggccagaaatgaagagaccttcttccaaatcactgggacaactgtgggaaggctgggaaggttaagaaacaacagaggtggacctccaaaaacatagaggcatcacctgactgcacaggcaatgaaaaaccatgtgggtgatttccagcagacctgtgctattggccaggaggcctgagaaagcaagcacgcactctcagtcaacatgacagattctggaggataaccagcaggagcagagataacttcaggaagtccatttttgcccctgcttttgctttggattatacctcaccagctgcacaaaatgcattttttcgtatcaaaaagtcaccactaaccctcccccagaagctcacaaaggaaaacggagagagcgagcgagagagatttccttggaaatttctcccaagggcgaaagtcattggaatttttaaatcataggggaaaagcagtcctgttctaaatcctcttattcttttggtttgtcacaaagaaggaactaagaagcaggacagaggcaacgtggagaggctgaaaacagtgcagagacgtttgacaatgagtcagtagcacaaaagagatgacatttacctagcatataaaccctggttgcctctgaagaaactgccttcattgtatatatgtgactatttacatgtaatcaacatgggaacttttaggggaacctaataagaaatcccaattttcaggagtggtggtgtcaataaacgctctgtggccagtgtaaaagaaaaaaaaaaaaaattgtggacatttctgttcctgtccagataccatttctcctagtatttctttgttatgtcccagaactgatgttttttttttaaggtactgaaaagaaatgaagttgatgtatgtcccaagttttgatgaaactgtatttgtaaaaaaaattttgtagtttaagtattgtcatacagtgttcaaaaccccagccaatgaccagcagttggtatgaagaacctttgacattttgtaaaaggccatttcttggggaaaaaaaaaaaaaaaaaaaaaaaaaaaaaaaaaaaaaaaaaa

SEQ ID NO: 14 - DNA, 3289 bp, Homo sapiens
ggcacgagggccatttctggacaacagctgctattttcacttgagcccaagttaatttctcggggagttctcgggcgcgcacaggcagctcggtttgccctgcgattgagctgcgggtcgcggccggcgccggcctctccaatggcaaatgtgtgtggctggaggcgagcgcgaggctttcggcaaaggcagtcgagtgtttgcagaccggggcgagtcctgtgaaagcagataaaagaaaacatttattaacgtgtcattacgaggggagcgcccggccggggctgtcgcactccccgcggaacatttggctccctccagctcctagagaggagaagaagaaagcggaaaagaggcagattcacgtcgtttccagccaagtggacctgatcgatggccctcctgaatttatcacgatatttgatttattagcgatgccccctggtttgtgtgttacgcacacacacgtgcacacaaggctctggctcgcttccctccctcgtttccagctcctgggcgaatcccacatctgtttcaactctccgccgagggcgagcaggagcgagagtgtgtcgaatctgcgagtgaagagggacgagggaaaagaaacaaagccacagacgcaacttgagactcccgcatcccaaaagaagcaccagatcagcaaaaaaagaagatgggccccccgagcctcgtgctgtgcttgctgtccgcaactgtgttctccctgctgggtggaagctcggccttcctgtcgcaccaccgcctgaaaggcaggtttcagagggaccgcaggaacatccgccccaacatcatcctggtgctgacggacgaccaggatgtggagctgggttccatgcaggtgatgaacaagacccggcgcatcatggagcagggcggggcgcacttcatcaacgccttcgtgaccacacccatgtgctgcccctcacgctcctccatcctcaccggcaagtacgtccacaaccacaacacctacaccaacaatgagaactgctcctcgccctcctggcaggcacagcacgagagccgcacctttgccgtgtacctcaatagcactggctaccggacagctttcttcgggaagtatcttaatgaatacaacggctcctacgtgccacccggctggaaggagtgggtcggactccttaaaaactcccgcttttataactacacgctgtgtcggaacggggtgaaagagaagcacggctccgactactccaaggattacctcacagacctcatcaccaatgacagcgtgagcttcttccgcacgtccaagaagatgtacccgcacaggccagtcctcatggtcatcagccatgcagccccccacggccctgaggattcagccccacaatattcacgcctcttcccaaacgcatctcagcacatcacgccgagctacaactacgcgcccaacccggacaaacactggatcatgcgctacacggggcccatgaagcccatccacatggaattcaccaacatgctccagcggaagcgcttgcagaccctcatgtcggtggacgactccatggagacgatttacaacatgctggttgagacgggcgagctggacaacacgtacatcgtatacaccgccgaccacggttaccacatcggccagtttggcctggtgaaagggaaatccatgccatatgagtttgacatcagggtcccgttctacgtgaggggccccaacgtggaagccggctgtctgaatccccacatcgtcctcaacattgacctggcccccaccatcctggacattgcaggcctggacatacctgcggatatggacgggaaatccatcctcaagctgctggacacggagcggccggtgaatcggtttcacttgaaaaagaagatgagggtctggcgggactccttcttggtggagagaggcaagctgctacacaagagagacaatgacaaggtggacgcccaggaggagaactttctgcccaagtaccagcgtgtgaaggacctgtgtcagcgtgctgagtaccagacggcgtgtgagcagctgggacagaagtggcagtgtgtggaggacgccacggggaagctgaagctgcataagtgcaagggccccatgcggctgggcggcagcagagccctctccaacctcgtgcccaagtactacgggcagggcagcgaggcctgcacctgtgacagcggggactacaagctcagcctggccggacgccggaaaaaactcttcaagaagaagtacaaggccagctatgtccgcagtcgctccatccgctcagtggccatcgaggtggacggcagggtgtaccacgtaggcctgggtgatgccgcccagccccgaaacctcaccaagcggcactggccaggggcccctgaggaccaagatgacaaggatggtggggacttcagtggcactggaggccttcccgactactcagccgccaaccccattaaagtgacacatcggtgctacatcctagagaacgacacagtccagtgtgacctggacctgtacaagtccctgcaggcctggaaagaccacaagctgcacatcgaccacgagattgaaaccctgcagaacaaaattaagaacctgagggaagtccgaggtcacctgaagaaaaagcggccagaagaatgtgactgtcacaaaatcagctaccacacccagcacaaaggccgcctcaagcacagaggctccagtctgcatcctttcaggaagggcctgcaagagaaggacaaggtgtggctgttgcgggagcagaagcgcaagaagaaactccgcaagctgctcaagcgcctgcagaacaacgacacgtgcagcatgccaggcctcacgtgcttcacccacgacaaccagcactggcagacggcgcctttctggacactggggcctttctgtgcctgcaccagcgccaacaataacacgtactggtgcatgaggaccatcaatgagactcacaatttcctcttctgtgaatttgcaactggcttcctagagtactttgatctcaacacagacccctaccagctgatgaatgcagtgaacacactggacagggatgtcctcaaccagctacacgtacagctcatggagctgaggagctgcaagggttacaagcagtgtaacccccggactcgaaacatggacctgggacttaaagatggaggaagctatgagcaatacaggcagtttcagcgtcgaaagtggccagaaatgaagagaccttcttccaaatcactgggacaactgtgggaaggctgggaaggttaa

SEQ ID NO: 15 - protein, 870 aa, Homo sapiens; identical to SEQ ID NO: 6

SEQ ID NO: 16 - DNA, 3613 bp, Mus musculus
ggcggcggagatcctgagggaagaggggaaggaatcccatcctcacgacaccacctcggcctctgcatccaggaagaagcaaaggaccagcaagccacgccaatggcaccccctggcctgccactatggctgctgtccaccgctctcctctccctgctggctggcagctcggccttcctctcccatccccgcctgaagggacgcttccagagggaccgcaggaacatccggcccaacatcatcttggtgcttacggatgaccaggatgtggagctgggctccatgcaagtgatgaacaagacaaggcgtatcatggagcagggcggggcgcacttcatcaatgccttcgtgactacaccaatgtgctgtccgtctcgctcctccattctcaccggcaagtacgtccacaaccacaacacctacaccaacaatgagaattgttcctcgccctcctggcaggcccagcacgagagccgcaccttcgccgtgtatctcaacagcacaggctaccggacagctttcttcggaaaatacctcaatgagtacaacggctcatacgtgccgcccggctggaaggagtgggtcggcctacttaagaactcccgcttttataactacacactctgccggaatggggtgaaggagaaacatggctcggactactccacggattacctcacggatctcatcaccaatgacagtgtgagcttcttccgaacatccaagaagatgtacccacacaggcccgtgctcatggtcatcagccacgcggctccccatggccccgaggactcagcaccccagtactcacggctcttccccaatgcgtcccagcacatcacaccgagttacaactatgcacccaacccagacaagcattggatcatgcgctacacgggacccatgaagcccattcacatggaattcaccaacatgctacaacgaaaacgcctacagaccctcatgtctgtggatgactccatggagacgatctatgacatgctggtggagacgggggagctggacaacacgtacatcctgtacaccgccgaccacggctaccacattggccagtttgggctggtgaagggcaagtctatgccgtatgaattcgacatcagagtcccgttctacgtgaggggccccaacgtggaagctggctctctgaacccccacattgtcctcaacattgacctggcccccaccatactggatatcgctggactggacatccctgcagacatggacgggaagtctattctcaaactactggactcagagcggccagtgaaccggttccacttgaaaaagaagctgagggtctggcgagactccttcctggtggagagaggcaaactgctccacaagagggagggtgacaaagtgaatgcccaggaggagaacttcctgcccaagtaccagcgcgtgaaggacctgtgtcagcgagctgagtaccagacagcatgcgaacagctggggcagaagtggcagtgtgtggaggacgcttctgggacgctgaagctgcacaaatgtaaaggccccatgcggtttggtggcggcggtggcagcagagccctctccaacctggtgcccaagtatgacggccagagcagcgaggcctgcagctgtgacagtggcggtggaggggactacaaactgggcctggctggacgccgtaagctctttaagaaaaagtataagaccagctatgcccggaaccgctccatccgttccgtggccatcgaggtggacggtgagatataccacgtaggcttggatactgtacctcagccccgcaaccttagcaagccgcactggccaggggcccctgaagaccaagatgacaaggatggtggcagtttcagtggtactggtggccttccagattattctgcccccaatcccatcaaagtgacccatcggtgctacatccttgagaatgacacagtccagtgcgacttggacctgtacaagtccctgcaggcttggaaagaccacaagctgcacatcgaccatgagatcgaaaccctgcagaacaaaattaagaaccttcgagaagtcaggggtcacctgaagaagaagcgaccggaagaatgtgactgccataaaatcagttaccacagccaacacaaaggccgtctcaagcacaaaggctccagcctgcaccctttcaggaagggtctgcaggagaaggacaaggtgtggctgctgcgggagcagaaacgcaagaagaaactgcgcaagctgctcaaacggctgcagaacaacgatacgtgcagcatgcccggcctcacgtgctttacccacgacaaccaccactggcagacggcgccactctggacgctggggccgttctgcgcctgcaccagcgccaacaacaacacgtactggtgcttgaggaccataaatgagacccacaacttcctcttctgcgaatttgcaaccggcttcatagaatactttgacctcagtacagacccctaccagctgatgaacgcggtgaacacactggacagggacgtccttaaccaactgcacgtgcagctcatggagctaaggagctgtaaaggctacaagcagtgcaacccccggacccgcaacatggacctggggcttagagacggaggaagctatgaacaatacaggcagtttcagcgtcgaaaatggccagaaatgaagagaccttcttccaaatcactgggacagctatgggaaggttgggaaggctaagcggccatagagagaggaacctccaaaaccaggggcctcgtgtggctgcccaggccatgcaaaaaacacccgattcccagaagatgaatgttggaactgggagacctgacagaaggcagggcctgctcttgggacaggaaatcctggaggacagcgcctggactttccgatgctcagtttctttgccctgctttgctctggatcaaacctcactggctgctctgggatgcgtgctcacacctggagtctctgctcaccctttcagaggctcacaaagacaaaggaactaatttccatggacacttcctccagagatggaaattgctgggattcgcccactcctcccctgcacccctcccccagtcatctagggaagcaagcttgttttaaccttcttactctttggagaaagcacggacatcccaggtgctgtcaacctcacagtcttgacaaagtctatagcacaaaacagtaccattcaccaggctggttgacctggctggctcagaagctgccttcaccacatacatgaccgctcacacgtaaccaacacagggaattgtaggggaatctcactaatatgaaatcccgcttttcaagagtcgcggtgtcaataaacgctgtggctaggatcaaggataatcccttgagctttcagacatttattcctgcccgggattcgttcctttgttatccatcccagaactgatgtttttctaaggtaccgaaaccccaagttgatgtgtgtcctgtgttttaatgacattgtatttgtaaagttttgtagtataagtaccatcttacagtgttcctgcccccagccaatgtctagctattggtatgaaaaaaaaatctttgaatttttgtaaaaaaaaaaaaaaaa

SEQ ID NO: 17 - DNA, 2628 bp, Mus musculus
atggcaccccctggcctgccactatggctgctgtccaccgctctcctctccctgctggctggcagctcggccttcctctcccatccccgcctgaagggacgcttccagagggaccgcaggaacatccggcccaacatcatcttggtgcttacggatgaccaggatgtggagctgggctccatgcaagtgatgaacaagacaaggcgtatcatggagcagggcggggcgcacttcatcaatgccttcgtgactacaccaatgtgctgtccgtctcgctcctccattctcaccggcaagtacgtccacaaccacaacacctacaccaacaatgagaattgttcctcgccctcctggcaggcccagcacgagagccgcaccttcgccgtgtatctcaacagcacaggctaccggacagctttcttcggaaaatacctcaatgagtacaacggctcatacgtgccgcccggctggaaggagtgggtcggcctacttaagaactcccgcttttataactacacactctgccggaatggggtgaaggagaaacatggctcggactactccacggattacctcacggatctcatcaccaatgacagtgtgagcttcttccgaacatccaagaagatgtacccacacaggcccgtgctcatggtcatcagccacgcggctccccatggccccgaggactcagcaccccagtactcacggctcttccccaatgcgtcccagcacatcacaccgagttacaactatgcacccaacccagacaagcattggatcatgcgctacacgggacccatgaagcccattcacatggaattcaccaacatgctacaacgaaaacgcctacagaccctcatgtctgtggatgactccatggagacgatctatgacatgctggtggagacgggggagctggacaacacgtacatcctgtacaccgccgaccacggctaccacattggccagtttgggctggtgaagggcaagtctatgccgtatgaattcgacatcagagtcccgttctacgtgaggggccccaacgtggaagctggctctctgaacccccacattgtcctcaacattgacctggcccccaccatactggatatcgctggactggacatccctgcagacatggacgggaagtctattctcaaactactggactcagagcggccagtgaaccggttccacttgaaaaagaagctgagggtctggcgagactccttcctggtggagagaggcaaactgctccacaagagggagggtgacaaagtgaatgcccaggaggagaacttcctgcccaagtaccagcgcgtgaaggacctgtgtcagcgagctgagtaccagacagcatgcgaacagctggggcagaagtggcagtgtgtggaggacgcttctgggacgctgaagctgcacaaatgtaaaggccccatgcggtttggtggcggcggtggcagcagagccctctccaacctggtgcccaagtatgacggccagagcagcgaggcctgcagctgtgacagtggcggtggaggggactacaaactgggcctggctggacgccgtaagctctttaagaaaaagtataagaccagctatgcccggaaccgctccatccgttccgtggccatcgaggtggacggtgagatataccacgtaggcttggatactgtacctcagccccgcaaccttagcaagccgcactggccaggggcccctgaagaccaagatgacaaggatggtggcagtttcagtggtactggtggccttccagattattctgcccccaatcccatcaaagtgacccatcggtgctacatccttgagaatgacacagtccagtgcgacttggacctgtacaagtccctgcaggcttggaaagaccacaagctgcacatcgaccatgagatcgaaaccctgcagaacaaaattaagaaccttcgagaagtcaggggtcacctgaagaagaagcgaccggaagaatgtgactgccataaaatcagttaccacagccaacacaaaggccgtctcaagcacaaaggctccagcctgcaccctttcaggaagggtctgcaggagaaggacaaggtgtggctgctgcgggagcagaaacgcaagaagaaactgcgcaagctgctcaaacggctgcagaacaacgatacgtgcagcatgcccggcctcacgtgctttacccacgacaaccaccactggcagacggcgccactctggacgctggggccgttctgcgcctgcaccagcgccaacaacaacacgtactggtgcttgaggaccataaatgagacccacaacttcctcttctgcgaatttgcaaccggcttcatagaatactttgacctcagtacagacccctaccagctgatgaacgcggtgaacacactggacagggacgtccttaaccaactgcacgtgcagctcatggagctaaggagctgtaaaggctacaagcagtgcaacccccggacccgcaacatggacctggggcttagagacggaggaagctatgaacaatacaggcagtttcagcgtcgaaaatggccagaaatgaagagaccttcttccaaatcactgggacagctatgggaaggttgggaaggctaa

SEQ ID NO: 18 - protein, 875 aa, Mus musculus; identical to SEQ ID NO: 12

SEQ ID NO: 19 - protein, 10 aa, Artificial Sequence
  artificial protein
CYPYDVPDYA

SEQ ID NO: 20 - protein, 8 aa, Artificial Sequence
  synthetic protein
DYKDDDDK

SEQ ID NO: 21 - protein, 11 aa, Artificial Sequence
  synthetic protein
CEQKLISEEDL

SEQ ID NO: 22 - DNA, 268685 bp, Homo sapiens
  misc_structure (0)...(0)
  misc_feature (0)...(0): n = A,T,C or G
gaattctagagcatctcacagatagaatgggggtaaaagaagaaacaacacacttgcaaatttgatgaaatttcccacatggtcctgaaatcgctggtggaatgggggattgcagtccgggtatgaggcattcgagagaatctgaatgtgtcccccaaagtgctccccagagactagcactgatcaggccgtggaaagcccaaggccctacacgacaggttctgggctctgctttccttgaacacctggtagaggggctggggagagaggcagaggctgagaatggctggagacaaatggtcagattcggttcttttatctgtagcagggactcaaacccagggtgtcctggctgctggaaggttgagcaatgctgagccgtatttccacacatggcttcactggcagaagcagggctgtcctgtggccgagaacccctcttccagccctgcacgggtcccctgacccctaggcctgcaggcattcacatacccccctgcaaagcccccaaccctccttgggcaaggacaggcacagcttcaggacatcgtcctcctgccctatgtgggcagagttgagaccccagagctgagagggaggctccccaatacccatctccccgataatggccaatgctccacaaagggtcacttccaaagaatgccaggtggcaggcaccaggttttggcatctgatatgctcccatccgctccctgggtccaaagcattcatcctttgtaatctctgacggggaacaactggctgttgtcctttaattagcaggggacacactaagctatggtctcctgcaggctccataaacatccgtgaaatcagcctggtgactccaagctcggtgcagactgcggggacccatagtggccaagaccccgtccctggtctggctctgcgaacagcctccaggagaaactgccaagccgctgggactcgtggcagctgctcaagctggcaagttctttcttgcaaattgagatccaggctgcaatctgggctggctctgcacattctgggtgcccgttatctgctggttggagctgcctggacacctctgagggctgcttgtgcatgggtgggggctgcttttgaacacatggctgtcccatgggccgcgccttctccacttcttctggcctgattaaatgatggttattgcagggaggatgcagggccaagcatcctcttatgcagcaccatgagatgcggggtgtccagtgtcccaggagaaattccagcctcatttccctctgagacactgggaagaggccacgtgcagtctcagtgcccggatcccaggtgcgtagtctgagtctgcatgaggtgccaaggtctggccctgggctgtgtgggatgagattgaagtgtgtctgatgggagggcccaggtcgcacccaccaggtgccaagagtgcacagatgtagacgccagtgcctgcccaagtcacccaaaacggagaaagggaggcgctgggaagccctcgggccagaggctgatgacgtggaatcctcgaggggactgcctgctgctcagggtagaaggggacatcctaatgcggcacccatgacagccccccaccattcctgcccctcagacccactgtccctggagacctgcagagggaaccactgctgaagagaaggcgtctccgtcacttgctttgtctccccttggtcaccacaaagacagatgctcccagccctcaggtgacaagcttgtgtttctgcccccttctgatacccctgctctacgggtgtggccactgctcctggcttgcagtgtctgtgcggctatgacagcccaggttcctctcagggcgggtgtccctcctgcagaaagctcaccctgtctcctgggccctggccctgctcctggacagaggagggaaggactggggtggtggctgatggattctcaggtcacctttttcctgtattcccctgggctcttccttcagagcctccaccctgcaccctgatgactcactgcatctcatgtaggaagcccccggtgacatctcatgccctgtacacaggtccctgcagcctgggcccctcctcagctctgctgcctctggcggaaaccccactttcacccctccctccttacgtctggcggggattgcagggggcttgttggagggaagccacatgtgagacccacatgacacaccaacctcccactgtgcagaccgcaccccatctattttcttccgtcccttctgcagtcaacacagccctggctctgcattcggccctctcttcacagggctgtgtctgggcagatggggctggaaaacaacttgctgggcccagctggggtgtgttgtggatgtcacagcccggcctgtgcaacaggaggctccaggatccctttaggggtagggtagggggcgggggaatgcaggttaaatgggatgggcaggggcaggcaggcaacaggggtgattaatttttctcaaagcgttgccaggctacctttcaattccttgtctgtggcccaggccaaggaaagcaaatgttctgctgccaacctggcttgtcttttaatcataccctttgcttgtcagtttagacaccctggtatattctcattgctttttagcaatctttgcaacttgctggacttttccacccaaataggaacagtagatcatgtgtactgtgtgccaggcactgtgctaaatgcattagctatttcaatcctcacaatagccctatgagatgggcactatcattatccttattctgtagacgaggaaattcgcacagagaggttaattaattagcccagagtcactcagctagtgagtggcagagctgagatttgaacctaggcagcctggcttcagggtctatgctcttaatctctcactgtaggggctcttaagtgagtttccagcttccatggcttcagttgaagggacttctctgtggaggcagggctaggaggaattttatccatgggtcctacagcagccatctagaaggatgggattggctgtgactcagactctacccttggtgctgcctctgcctggagctctgtcccctggctcatcccaggatctgctccgtctccctcctcaggactcaagtgcagcattgcagaggatgtttgctgagcacctgctatctgccaggcactgtgctaggtgcaggggatcttgcaacaaacaaaattcctgcttttatggagcacacattcagtaagtggagagggataaacaaatcagtgaaaggtatgcatgtcagctgctaatccatgctacagggagacattcagcaggcttggggataggaagctccaggtatgtgggagggtgtgttagcttcctgtggttgctatgacgaatcaccaccaacctgatagcttcacacaacacatatggactctctcctagctctggaggtcaggagtctgccgtcagtttcactgggctaagtcaaggtgtcaacagggctggctcctgctggatgccctgagggcaggactctttgcattttcagtgtctgtatttccttccttctttccttcctttctttgtttcttcctttcttcctttctttctttctttttctttctttctcccttcccttctcttcctttcctttctttccttcctcccttcctttctcccttctctttctcctccctttcattccccttccctccttcccttcccttccttctcctcccctcccctcctctttctttctttctctttctttccttctttcttctctccctctctttctctttctccctccccttccctctccttccctccctccctccctccctccttycytkssskkccttccccttccccttccacttcccccttcccttcccttcccttccccttccttccttccttccttttttttcctctctgtctttgtctctttcttttttttagagacagagtctcgctctgtcacccaggctagagtgcagtggtgcaatcttggctcactgcagcctctgcctcctgggttcaagtgattctcctgcctcggcttcccaagtagctgagactacagatgcgcaccaccaggtccagctaatgttttttgtattattagtagacacagggtttcaccatgttggccaggctggtcttgaaatcctgacctcaagtgatctacccgcctcggcctcccaaagtgctggtctggcctgtattttcttttgagcccctcatactcctgggagcgtggctccttcctccatcctcaagcacatgattccagtctctgccctgtcactacagctcctctgactcagaccctcctgccctcctcttataaagaccctgtgattacactgggcccacccaggtcatccagagtcatctttccatctcaagatccttcactttacaccagcaaagcgcctttgcaatggacatacacacagggcccaggggttttaatgtggacacatatggggggcccttgttcagccccctatggaaggtggttgttgattttcagtaggatggtcagggaagaccctgctgagaagccaccatttgagccaagactggaggagctgaggctgcgggccaggatgacatcgagggtggagccttccaggcaaaaaaacagtgagtacaaagccagcaacaggtgtgctggcatgttcccggaaaaccggggagggagccacagctgcggccgagtgaggagaggagcagcgggaggtgaggccagagaagccttggaggcagaagctgcgggcctcatggttatcatgaagctccgggttttactctgagtacgcgggagccatggagagttctgagcagaggaagcacaggacctgacctgggtttcacaggcttcctctggctgctgtgtggaaaataggtaaatagggcaagagtggaagaagggaggcctgtcgggaagcttttgcacaatggcccgggtgagaaagactcatggcttggagcagatgctgggatgtgtcccccacatcccctttcaggagcaggcacgcatgccccactgcccagggggttgcctgctgagagctcacagctgagaccctccccagaaaatgcccctggctgacaggagctgctttgcccagtcacccttcctggggtccctccatctccaaagactagtagtaaacacaggggtctaaaggtccagccccttgactcaattcttcgcagttctgaagggccgtcttcactgcagacttcctcgaaggatggattgcaaagtcatgtgtagagtgtgcagggctcgggtgaatgtctatatgtctctctatattttaggatcgctgtctacattagcaatttgtttaaaaatatatttcaaaattcctgtgcccacgtgaggtctagtgatttatccatgaaggtatagaataacggatagagaagggatacttatgtggtttgttgtccgacagatcgtgtgaaagtttttcgtcatgtccaggcaccacctcttcccggtcaggcccacgttacatacgaggacaatggaacaagtcaaaggcaaagcaacacgtccccctgtaaaaactgtcagtgtaaccgtccacttccgtatctgtccagtcacttaacaaacattgacggaccacctttaaacacaggctgctgtgctggtgtctgggacacagcggtgagtaagagccatctgatctcatgacactctcaggaagttccagtctatgaggatggacagcatgcaggtcaacacataaacatcattcagactgtgaaaaatacaacaaaggacacagattgggagatgggataaagagtcatgggggtggagctactgtctcattttgggtggtctgggaaggcctctctgaggaggtgacatgtgggctgagtcctgaaggataagaaggggctgccatgggtgatttgagggaacagtgtgctaggtgggaggaacagcaagtgctaaggccagagatcaggcagatcagagatgaggccagggtatctaagaagtcaggagagtgctaagagatggggatgcagagacactgtcaggtgaaaaagaaagagaagggagccaggtgtggtggctgacacctataatcccagcactttgggaggcagaggtgggcaggttgcttgagcccaggagtttgagatcagcctggacaacgtggccagacctcatgtctaaaaaaaaaaaaaaaaaaaaaaaaaaaaaaacagacgtggcacatgcctgaggtcccagctactgaggaggcaggaggatcatctgagcctggaaggttgaggctgcagtgagtcaagatcatgcccctgtaatccagcctgggtgggtgacagaacaagaacctgtgtcaaaaaaaaaaaaagaaaagaaaagaaaaaaaggaaagggaagagaattgtcacattttattgcgacgacagtgttttgtttatttaaaatattttctctcccctttgagtccagcctgacactcaggagatggggagagccttcctctcactccgcctcaggaggagctcgaacctgctcccttaaatctccatcagctccgcaagcacttgggctctgctggctgtaacgctgctccctgtttaccagaggcttttgctggcacatgtatcactcagactctgaactagatcaagccacagaaaacttcgattcatggagctgctggtccccattaccacaagatatgcattctttctctttgataaggaattaaggtgccatattcaaactttaatctgtaaatacaggtaaataaaacatgattacagaaatcattttcaataaaaatccatcttgagcttaagtttctgccttactgaattcaacttttgagagtgggtggttgtgcctgctgcagataattgtgaccctgaatagctggaactgtgttcactgtgaaccaatgtttcctctgagagccccaaagaccctgagtgtgaatcgcttgagtgggtggggtctcttaccctgtgagtcctcccaccaggggccccatccttccacccatctttcctcgggcctgtttcccttgaggtctgagctggggtgcccagtgaggggtcatccttgctgtgagataaaaccgaggtgtgactccccatctccatgcagggccctagagggtgtgcgcagcttcaaccatctgatcaagggtggattcaactccctgctcagggcagcagctcgtggttcattcagctccagcgacgtctcgatggggataaggtaaggggcacagagaaccaaagattgggtctgatgggattaaacccccaactggtgtccctgtgtcttctctttcctgacaccagacgccaagaagaaagagccacaaacacacctgtcagtgaattccaaagggtgagctgggggccaggcggcctctgaagtctccacatgggttttgagcttttgcttttttgaagcagcaaatctgctctgggctaggaattggtgtttgctaaatgcacaggtggtctggagtgatgttttccttctttagcaaagtaacacatgctccttacagagagttagacatgcaaagaggcaggcatgttttttaaggataagttaaacattcaacaggttctcgggcactgaatgaaaggtgtccccgcaagtcagcccctcagccccccagtttcttcttggagaagccagtgcagggctccgcgttgggggccagtgggtaggaggctatctcaagacaccaggaggcgattagagggtctcagtccattttgatacctgtgctcgggggttgttggcttggactggactcctggcagcacccagtgagaaagggacaaatcaggctgtgactctggccgttttctcctctgcgactatgattcctttgctgcaccccctctttctggcccatccacagagcacagacctgtccttgctggctgacatttccctgctccctgaggcctggtgtgtaccctggggatgctcagagagtgtccctggattgatttcagggccctcacttcttggaggagatgtcattccctgcagagctccattcacctgctctgagcactcctcatcctgcccaaggacgtgctctctggtttggctggaaagaatgaccccaccatgccaactctgggattcaggcaaatcagagctgctcagcccaggctgcgttgtccagctggcccaggtgtttgtactgaaacacagctgtgtgcccactggttggtgcagagatgctgtctctatccmtatggagaccccgtactggcaccccaagatacagcagcacaaggggcacaattgctggcccagcagaaacctgaggaccccacactcgagctacggtcagtgtccacgatgactggccagccaccaagtgaacaaggacagaggcgtgggcagacgtgctgtggcctctcagtactgggtgtgtgagtggccagagagggggtctagatgccccaggtgtcttcacacccagaccagggtttgccagaccctgatggccctgagagtcctgaccagacccccgaaggccaacccaacatgctgggaatgaccatcggtgccaagcgggccttggacagctggggaagggctgtcacctcaaatgtcccactacctggctcctcctctttcctcagggacccgaatctgcccgctgggcacaggtcctcacacaaaggctggtccaggaaaaacaggaccacattgccaggcggcctgtccttcccctccccacaatctgtgctctaattacagaaatgacgggctcatggccagagacgccaagtaacagagaaagagaataaagtagaaaataagaatcattccccaacctacccccacacggagctgcgttttaaataactaagctccttgattgtgtctgtgtggaggcctgagttcctataaccgaggctgttttctcttttttttttttttttttttttgagacagagtctcactttctcacccaggctggagtgcagctgcccgatattgtgacctctacctcctgggttcaagtgattcttgtgcctcagctgggcaccaccatgcctgctcatttttgtatttttagtagagacgggggtttcaccatgttggccaggctggtctagaactcctgacctcaggtcatctgcccacctcagcctcccaaactgctgggattacaggcatgagccaccgtgcccggccttgtctgttttctcttcatgagtgcccggtgtcaacgggagaagcagcactggcctgagcctctaagccaaagcgtccgggcacagctggggacaggcaacatggacccggtcactgtggtcctaatggtagattgtggtcctgttggcataggcggctcatcacgatttcacctgtagctgctttatggaaggtctgaattggataggagcagaaaacagcttcattgttctctagccgctgcattccagcagcttctgtgaggcaggggccagattagggtgagtgagtgaggccaagtcatgcaaatacagggtcaaattgtgtcttagttgaaatgttgataactttcccattagggtttttttttttttttttgcattgaatttaacttttgaaaaaaattctgcactaaaatattatttattttgatccgtgaattttttggtgcccccttaaattttatgcctcatttgctgcatcctgataatccagagatgagcgcctccctcccctgcctcgccctagtccccatcctgctgataggtctctggtctctgctccttgatgacatctggggaagttttcctaggattttggtcaccttgatttataatagcagacttgctaataatgagtggaatatggccaggcgccggctcatgtctgtaatcccagcactttgggaggccaaggtgggcagatcacttgaggtcaggagttcgagaccagcatggtcaacatggtgaaaccctgtctctactgaaaatacaaagattagctgggcctagtgatgggtgcccgtaatcccagctactcaggaggctgaggcaggagaatcacttgaacctgggaggcggaggctgcagtgagctgagatcatgccactgcactccagcctgggagacagagcaagactctgtctcaaaaaaaacaaaaacaaaaatgaatggaatagctcatgtttcggtgttacaaaatccaggccagacaagtctcaactttaatctcacgcccagttcctaggttagtcccttctccagctcaaattcagcctaagcctcaggggtccttggtcggggtggcaccacctgctcccttccccaactttgttcctgtttttaatctgctggggctgggtgcattcagaggtagggacaggctgaaggtcttcagctttttggttctgttgatgggtgagttccaaatactagctttctcttgtaggatatttcatttatttgttaaaaatatttatttagaacacaccattcatgtgccagacgctattccagccactggggatagggtgataaatgagataaacaaaaatactcgcccacgttaagctcctattctagggaagagaggaaaaaaaagaaaatacatgtgtacttagtacattagaaggttccaagtactgttaaaaaaaataaagcaggctggactcagtgactcatgtctgcaatcccagcattttgggaggcagaggtgggcagattgcttgagctcaggagttcgagaccagcctgggcaacacaacaaaaccccgtctctacaaaacaaaaacaaaacatttagctgggtgtggtggcatgtgcctgtcatcccagctactgaggaggctgaagtgggaggactgcttgagcctgggatgcagaggttggagtaagccaagatcacaacattgcactccagcctgggtgacagagtcagaccctgtctcaaagaaaaaaaaaaaaaaaaaacaggaaaaagaaagcagagatggggactagtggkgagggggctggggatgakakyctccctgagcttccacagttcttyctgctcctctcctatctcactgggcacgggccacctggggcttctggttgttttgtgccaacttaatatgttgttcttgccaacagtcagaggccaactgaggcttctctgtcttccacaaggaacagcattggcctaaacctgcaggcaccattgcaaaggggagtcagctcaggtaaacccgctggtgaaacatgattccagcgtggggacacagaggctgatgtatcttgctgtaggtgatttaatgttgggcctcactatttcactacccctgtaagagtatgacacatccacgtccttaccagggcccgagggagggtggatagacttatccatcccataggtattgctcgtggctgggtaacttgcttatgccaacaagattttttcatagacacggcacaggcagaagcctggaatgtgttggcactgccaggcctgccctctaatgctcttgatttttcccacgagacgagcgtgccccagggaacttcggctccagctgcaggatgagaggcgtgtggagcacgcagggttccaaccctcagcctggagtcaagcccagactagatcagcctaagcccagccaagccacaggtgcaggagtgaaaagcaaatgctaactgtccatgacattgactttcaaaggggcatgtcatgttatgtggctcatcccagcaacaatgaagatatttctccatcagtcagtcggtgaataattattgacaatgtgctaggaaggtggagtgattggagtagatttggtccctattctcatggagcttactttctagaggggaagacagatgataggtgaataaatataaattattctattaggttgatgcagcagtaattccggcttttgccagtaaaggtaatggcaatcaaaagcgggaggagccggagctgccattcattaaaagcaatgacaaaactgtgatgacttttgcaccaacctaatagaataaattacgagtgcgcaaaacgctgtgatgggaaagttccaagtgccaggatagcatctagcttcctggagtcaggagatgggggttttcaacctaagcaaggttaagtccaagtggtgggggcaggcggggggcgatatttcaggggagactccaaggatgaatggaaattagaaaagtgaacgcagatggtgaggggggacgggtttcaggcacagagaacagcatgtgcaaaggcctggggggaggacatcgtgtgttcatggactgaggggcggccagcaggctggagctgagccggtggagaggaggatggggagccggggaaaggcgctccatgcagggggcacagcaggggcaaaggcccggagtcaggcctgaacctgtgtggtttgaggaagtgacagaggcctgtctgggaggaaagtaacagcagaggggagaccataaggtcagggcagagggcagggccgtgctgggcactgtgggctgtggataggacctggcacgtatgctcgggtgaggggaacgtgttagaagattttaagaagggcaggaacatctggggataatgtgtattctaggaatctcaaccaagtaaattcatagtttgaatgttcacaagacttctgcacaggcaaagtgaaagatcgtttctagagctgtgagataagatcatagtaaaaaagaactactaagtttttaaaggttatttcaaatgatggatttccatcttacaaatgaatgcaagtaggttgcaaggttgatggaaagtagaaaagttttctgacttgcgtgaacagaaaagaaacatcaatttgaaaggaaaacatttatttatttacttcctctacagttttcctgactgctacatttcatgagaagggattgtttatgagggtcaaggagctggaggcctggggaggagctggtgtttctgttcaagtttgagggtcctggagctggagtccaggggaggagccggtgctgccactgatgtcttagggtcgtggagctgaagatcccagaggagccggtgctgctattctagcttgagtttcgtggagctggagacccagggagaagatggtgctgctgttctaatttaaggatcgtgaaacagaagacccagaaaggagctggtgctgccgctgctcagatctgagggtgttggagctggagcctgggggtggagccgttgctgcctttgaagtctgagagtcattgagctggaagtccaggaagcagctggtgctgctgttctagtttgagggtcgtggagcgcagacccaggcagaagcaacattgctgtagttcgagggtcagaaagctggcgacccagggaggagaggtcttgttctagtttcagggtcgtggagctgccaaaccaggtaggagcaattttgttgtaattcgaaggtcaggaagctggagacccagggaggacaggtcttgttctggtctgagggttgtggagctgcagacccagggaggagcaatgttgttgtaattcgagggtccggcagctggcaacccggggaggagaagtcttgttggagtttgagggtcgtggagctgccgacccagggaggagctattttgttgtagttcgagggtctggaagctggtgacccagggaggagaggtcttgatctggtctgagggtcgtggagctacagacccagggaggagcaatgttgtaattcaagagtccggtagctgacaaccggcggaagagaagtcttgttcgagtttgagggtcgtggagctgcagacccagggaggagcaattttgttgtagttcgagggtcaggaagctggcgacccagggaggagaggtcttgttctggtttgagggtcgtggagccgcagacccagggaggagcaatgttgatgtaagttgagggtccggtagctggcaacctggggaggagaagtcttgttcgagtttgagggtcgtggagctgccgacccagggaggagcaattttgttgtcgttcgagtgtcaggaagctggcgactcaggtaggagaaattttgttctagtttcagggttgtggagctgcagacccagggaggagcaaggttgttgtaattcgagggtcaggaagctggcgacccagggaggagaggtcttgttctggtctgagggtcatggacctgcagacccagggaggagcagtgttgttgtagtttgaaggtcaggaagctggcggcccagggaggagaggtcttgttctagtttgagggtcgtggagctgccgacgcagggaggagcaatgttgttgtaatttgagggtccggaagctggcaacccaaggaggagaagtcttgttcgagtttgagggttgtggagcagccgacccagggaggagcaattttgttgtagtttgagggtccagaagctgacgacccagggaggagaggtcttgttgtagtttgagggtcgtggagctgctgacccagggaggagcaatttggttgtagttcgagggtccggaagctgacaacccagggaggagaggtcttgttttagcttgagggttgtggagctgccgacccaggcaggagcaacgttgttgtaattcgagggtccggaagctggcgacccagggaggagaggtcttgttctagtttgagggtcgtggagctgcagacccagggaggagcaattttgttgtagttcgagggtcaggaagctggcgacccagggaggagaggtcttgttctggtctgagggtcgtggagctgctgacccagggaggagcaattttgttgttattcgagggtcaggaagctggcgacccagggaggagaggtcttgttctagtttgatgttcgtggagctgcagacccaggcaggagcaacgttgttgcaattcgaggatccggaagctggagacttagggaggagmcgtcttgttctagtttcagggtcgtggagmtgcagactgaggcaggagcattgttgtatagtggaggtcagaaagctggcgacccagggaggagaggtcttgttgtggtctgagggtcgtggagctgctgacccagggaggagcaattttgttgtagttcgagggtcaggaagctggcgacccagggaggagaggtcttgttctagattgatttttgtggagctgaggacccaggcaggagcaaggttgttgcaatttgaggatcgggaagctggagacttagggaggagacgtcttgttctagtttcagggtcgtggagctgcagactgaggcaggagcattattgttatagttggagggtcagaaagctggcgacccagggaggagaggtcttgttgtggtctgagggtcgtggagctgctgacccagggaggagcaattttgttgtagttcgagggtctggaagctggcgacccagggaggagaggtcttgttctagattgatttttgtggagctgaagacccaggcaggagcaaagttgttgcaattcgaggatctggaagctgcagacttagggaggagacgtgttgttctagtttcagggtcatggagctgcagactgaggcaggagcattgttgttatagttcgagggtcagaaagctggcgacccagggaggagaggtcttgttgtggtctgagggtcgtggagctgctgacgcagggaggagcaattttgttgtagttcgagggtcaggaagctggcgacccagggaggagaggtcttcttctggtgtgagggtcgtggagctgcagacccagggaggagcaattttgttgtagtttgagggtctggaagctggcgaccccgggagaggtcttgtactagtctgagggtcgtggagctgcagacccagggaggggcaatgttgttgtaattcgaggttctggcagctggcaactcggggaggagaagtgttgttggagtttgagggtcatggagctgccaacccagggaggagcaattttgttgtagttcaagggtccggaagctggtgacccagggaggagaggtcttgatctggtctgagggtcgtggagctacagacccagggaggagcaatgttgttgtagttcgagggtccggtagctggcaacccggggaagagaagtcttgttcgagtttgagggtcgtggagctgcagacccagggaggagcaattttgttgtagttcgagggtcaggaagctggcgacccagggaggagaggtcttgttctggtctgagggtcatggagctgctgtcccagggaggagcaattttgttgttattcgagggtcaggaagctggcgacccagggaggagaggtcttgttctagtttgatgttggtggagctgcagacccaggcaggaggaacgttgctgtagttcgagggtcagaaagctggcgatgcagggagaggtcttgttgtggtctgagggtcgtggagctgccgacccagggaggagcaattttgttgtagttcgagggtcaggaagctggcgacccagggaggagaggtcttgttctagattgatttttgtggagctgaagacccaggcaggagcaaggttgttgcaattcgaggatccggaagctggagacttagggaggagaggtcttgttctagattgatttttgtggagctgaagacccaggcaggagcaacgttgttgcaattcgaggatccggaagctggagacttagggaggagacgtcttgttctagtttcagggtcgtggagctgcagactgaggcaggagcattgttgttatagttcgagggtcagaaagctggcgacccagggaggagaggtcttcttctggtctgagggtcgtggagctgcagacccagggaggagcaattttgttgtagttcgagggtcaggaagctggcgacccagggaggagaggtcttcttctggtgtgagggtcgtggagctgcagacgcagggaggagcaattttgttgtagttcgacggtcaggaagctggcgacccagggagaggtcttgtactagtctgagggtcgtggagctgcagacccagggaggggcaatgttgttgtaattcgagggtctggcagctggcaactcggggaggagaagtcttgttggagtttgagggtcgtggagctgccaacccagggaggagcaattttgttgtagttcaagggtccggaagctggcgacccagggaggagaggtcttgttctattgtgggggtcgtggagctgccgacccagggaggagcaattttgttgtaatttgagggtccggaagctggcgacccagggaggagaggtcttgatccggtctgagggtcgtggagctacagacccagggtggagcaatgttgttgtagttcgagggtctggtagctggcaacttggggaagacaagtcttgttcgagttcgagggtcgtggagctgcagacccagggaggagccattttgttgtagttcaagggtccggaaactggcgacccagggaggagaggtcttgttctagtttcagggtcgtggagctgctgacccagggaggagcattgttgttttagttcgagggtcaggaagctggcgacccagggaggagaggtcttgttctggtttgagggtcgtggagccgcagacccagggaggagcaatgttgatgtaagttgagggtccggtagctggcaacctggggaggagaagtcttgctcgagtttgagggtcgtggagctgccgacccagggaggagcaattttgttgtcgttcgagtgtcaggaagctggcgactcaggtaggagaaattttgttctagtttcagggttgtggagctgcagacccagggaggagcaaggttgttgtaattcgagggtcaggaagctggcgacccagggaggagaggtcttgttctggtctgagggtcatggacctgcagacccagggaggagcagtgttgttgtagtttgaaggtcaggaagctggcggcccagggaggagaggtctgtyctagtttgagggtcgtggagctgcagaccgaggtaggaacaatattattgtagtttgagggtcctggagctgcagacccagggaggagccatgttggtttgaatgttgtggatctggagatccacggaggagctggtgctgcctttgaagtctgagagtcacttagctggagatccagagaggaaccggtgttgctgttctagtctgaacagatctagagttctggggagttgccggttctgcctctcaagtctgagagttgttgagctggagattcagggaggagcctgtgttgctgttttagtttgagggtcatggagctgcagactcagggaggaggggtgcggttctagtctgagggttgtggagcttgagacacagggaggagctggtgctgctgttgtttaaggctgagggttgtggtgctggagacccaggtaagagctggtgctgctgttgtttaaggctgagggttgtgtagctggagagtggggaggaggtagtcttagtgtctaatgtgakgttggtggagctgtggacctggggtggggccggtgctactgtgtagtttgagggtcatggaactggagacctagggaggagctggtgctaccaccatttaagtcagagggtcatggatttggagctttggggaacagcccatgctgctgtttaactgtggggaggatctgctgtgtccgttgaagtttgagggtttgggagctggagacccagggaggagctgatgatgccattctattttgagggtcgtggatctggggacctggggagaggctggtactgctgttgtagtttgaggttcgtggaactggagacagggggaggagccggtggtgctgttcatgtctgagggttgtagagctggagacccagggagaagcccgtactacagctttttaagtctgagggtcgtggagcctgagacctggggaggggccagtgctgctgttcaaatggctcctttccgggtctccagctccatgaccttcaaactaggagagcagcagcagctcctcccgcggtcttccagctccatgaccctcacactagaacagcagcagcagctcctcccggggtcttccagctccatgaccctcacactagaacagcagcaccggctccaccctgggtctccagatccacgaccctcaaagtagaacagcagcactgactcctccccgggtctccagctctacaaccctcagacttgaggagctggagactcggggaggagccagggctgcttttctactttgagggttgtggagctggagacccaagatgcagcagctgctgctattctagtttgagggccttggagccagaaactttgtgaggagccggtgctgcctttcaaatctgagagtcattgagctggagacccagggaggaaccggtgttgctgttctagcctgacagtagtgaagctggagacccaaggaggagccggtgctattgttcatgtctgaggattgtgtagctggagacccagggaggagtcggagctgctgatctagtttgaaggctgtggagctgcagatcccaggaagagccggtgctgccgttcaaatctgtgggtcttggagttggagccctggggtgacccagttctttcattcatgtcttaggatcatggaactggaaacctacggaggcggcggtactgctgttctagtttaaggatcgtgaagctggagacctggacaggagctggtgctaccgctgttcaaatctgagggtcatggagctggagtcttggggaggtgccggtgctgcctctcaagtctgagggttgttgagctggagattcagggaggagccggtgttgctgttgttgttggaggattgtggagctggaggccaaagaggagctggtgttgcagttcaattttgacggtcgtgtagctggagacctagggaggagctggtgctaccactgtgtaagttgaggtttgcagagctggtggccacggggaagagccagtgctatagctgaagtttgagggaactggagacccagggagtagccggtgctgctttctagtttgagggttgtggagctggaggcttggtggggagccggtgctgcctcccaagtctgagagtcattgagctggagatccacaggggagctggtgctgctgttgtagtttgaggattgtggagctggagacccggggcggagctggtgctgcagttggagtttgagggtcagggagctggagatctggggagcggccagtacagctgtttaagcctgagggtcgtggagctaaacatggagccaaagttggggaagcagagagagagagttacaggatgaccctggaaatggtagacgtagctgtaccccaagcaagctaagcttgggaactcctcaatgctagtgatgaatgcattctttttcctcttacacagtttggatttgttttctgtgtctcatgagacagaaagatcttgattaatacccttaggaattgaaaagcttaaaaaactaaaggatgttggtaataaaaataataagaattaaaccatgattatcctggctgacagagacaaaatcacacacacacaatatatatctttcaatcagttagcaaaattaaaaaaaatggaaaaatagacgcaagcaaagctataaaaagttgtttcatggagaagcgatggaggacagcgattaatctgagagttgctattaatggagaaactgagaacttaccatttttcccatgaggttttggtgtagaatgatattgtgtgagttctggcagctgagtcacttcacacagcccggtgatgcagtaggtgtcacagaaggaccctctcccagttagttctgcctcactgctccggtgagtgcggcctctgatccccaacagctgactgtgtgttgagaccacgcccatgagcacaagggtttccacggtgaaggttcctggatggaacactgtggatgtccctaatgttccttcctgatgttcatctgccatcttgctatttaatgcaatgtcttctaaatattgaatagaaaaaagtatttgtacaatatgggcaaggtataaagaatatccacacactggacacacagacagagaggggcacccacagcaaactccctttgcctgggagcaggtgtggtccttgagtcctatgttgcctgtttcttcctccgccttggcctacgggcccgatgtgatctgacctctgcctgcctctccgactccatcccccctcccgctcctgttctttctaacaattatgttacagcctcagtgaatgtgacaaggaccctgaatgacggtggctttactaagacagaggttcattcctttcacatgaaagtccaagccagtcgggtcattcttctctgtgcatttttcagggtcttaggctacttccatcttgctgctctgacttccttagggtatagcttcccccacagtgtccatcctatctactgccagccagcagggaggggagaagagaacaagaggacacaaatcttccttcctctaatggcagttgctgtgcactggcctcatgtgcattggtcactgcctggtcacgtggcctctgcttgctgctaggggtgctgggaagttttcatcctggatgccarwgcccacctgggtgactcctgaggttgaggggagagaggacatgaaagagagtcactggctcttcccaccatcatgcatgtcgttccagtctagggcgacccactgcctcagcttgctcaggactgaggagggtcatggggcacagacctctcagttttataacagggcagtttcaggcaaatcatcccagcttggctgagactcagaattttcctgggatatgggatttctagtgttaaaactgagaaagttctgggcaaacctggacaagttggtgcctgccatggggcctttgcatctactgttacccctgtctgggattccctttctgcagctctgtgtggtgctcactccttttctgttgaggaaaggctgctctctgggtgtccccgggtgcctgttccgctctactcagcactacatgctctgtgaatatccctccatgcacttcgtagaatgagatctgttctttccacccttgcctgcccacttcagtttcaaagtctctgaggattattcatttttattctcttcagcactgaaagatacatctctttccctaaggctgtggctgggttcacgcatagttagataaatctgatattaataataacccgaatgaaaaacatgtattgaatcccaagattatgatgtaggaagcacggattctgaagagatgtctaagcctaataaaggccaaagggtgtggattaaaaggaaatgtggggtggagaaacatttcatgaaatagaaccccacctcttgggtgagttcgttggtacaacttttctagagggcaattttgcaactggccaatgaaggtgcgtaacttttggtcccaaatttcatttataggcattgatccctaggaaatagtcagaaaaatatgcaaagatgaatctcaaggatttttataagaagaaagaagtaggaagcataaatgcccactggtggtcccacaccctggcaccagtgctcccctctcctagtgggcgggcacaggctacattttcccaggcttccttgcagtgagttgtggccatgtgaccaggttctggccaatgggaggcaataaaagtgttgggtggtatttttggagacccccttctgtaacttctgtcttgatatggtttggatgttggtcccctccaaatctcatgttgaaatgtgatccctgatgttggaggtggggcctggtgggaggtgttttggtgatgtgggcagatccctctcacaatggcttggtgccatcctgatggcaatgactgaattcttgctctgagtttatgggagatctggttgtttaaaggggttggcacatcctcctccctctcttgctctttctctcgccatgtgatgtacctgcttccctttcaccttctgccatgattggaagcttcctgaggcctccccaggagcagatgctggtgccatgcttgtacagcctgcagaactgtgagccaattaaacctctcttctataaataaccagcctcaggtattcctttatagcaacgcagatggactgacacatatctttaatgtcatttcttagttgttccatcctttgacctgcttcctggaataagcgtatgatggttggagctattcttgtcaccttgaaccttgaggattaggcttctaccctgcggatagcagaatgtcctctggaaggaaatgaaagtccctaacgccaccctagactgagaacctccagttttgttttkacttttkkatkttttgagacagactcttgctctgttgcccaggctggaatgcaatggcgtgatctcagctcactgcaacttccgcttcctgggttcaagtgattctcatgcctcagcctcccgaatagctgggattaccggtccgtgccaccatattcagctaattttttttatttttagtagagacagggtttcaccatgttgagcaggctagtctcgaactcatgacctcaagtgaaacacctcagcctcccaaagtgctgggattacaggcgtgagcctctgtgcccggcccagtcttggttttcatgagataaacttctgtcttggctgaagttaaatcactgataggtgatatgaccataactggataaaaagtaggaaattcatgtaatacttatatctacatatgcccataccaaaaatgatagtgatctgttgttatctatgtgtaaatatggacacaaaatattgtttagtgtaaacaaagctcttcttttttttttttttttgagacagagtctcactctgttgtgcaggctggagtgcaatggtgagatctcggctcactgcaacttccgcctcctgggttcaaacaattctcctgcctcagccttctgagtagctgagattacaggcacatgcaccacatccagctatttttttgtatttttagtagagctagggtttcaccatgttgtccaagctggtctcaaactcctgaccttcagtgatctgcctgtgtttacaggcatgaaccactgcacctggcccataaagctgtattctattttaatgaagcaaaaatgcataagtgtgtaagtgtgatcatatgtgtgtgtatgtctaacaggagcactacatagcaaaatgcgaatgctgcttatctttggtgttggtatcacgtgtgatttaaaatcttgttttcttctatttttaaaaactttcaaaatgagtcatgactttgattattagaaaagaaatctataacaattgagaggaaagaaaaccccacctgttgttgaaactggctggagctgggagaaatgagagattcctttgcaggtgtcacctccctaccagaaaactggccttgcaggaatgtcccacaagccagatgtgtctctttcccccagtccctgtgcctggtgtgaggtcgtacagacagtgagcgtccttcacagagtctgacctgccaaggtaggggggaagtgggggtttagtgacattcaaaacccgggggagccgaacaggtgtgactgtatgtttgcagggtgacctctcccctcaaagagcaagaaataactctagtgcaatttccaaacatttacaagagaggatttttaaacttttcacttctttattccaagtagcacatttggaagcacaaaatgcacaaagaagacctgctatttacaatcactttcactaagccagtgttatattcaaaaacagcagataaagctcatggctttgatgaaaggggcagtcttttcattggaaacaattaatactgctccccgttctggggagaatttaaagaaaataatttggaaggggatatggcttgatacaatcaaatgatttcagatcacaaatgtaatcatttgatcttgctttaaaaccaaacatttcagaacaatctggcatcacattctcttctgagtctgtgaaactctgaattctgggtgagtttgaattcccaaggcaggactgaggatagaaaagatttgatggcagaaacctggtactgtggttatcacgtgggttaaagatgtaggcttggttaacccactgaacctgcttatgtatgaggctcacctgagaaggtgatatggacaagcccatcttatgggtctgagggctcttcaccaggagtggagcaaggaggatggccccagcgtccccgtctctgaacacgtttagcgggagggctgtagagcctggacagatcaccactggctccatggggaactttcagcagcactcattgcctgtgtctgttctgtgccaggcactgcgctcagggcagggatttgggattcaccagggcacaaggcgacgtgcgtctgtcctcacggagcctaagtgctggtggagacggacagtgcagatgccaaccgcaaatgacgaggcacttgcaggtaggggtcagcgccaagaaggaaatgaagggtgcgtgtcgctgactgagactctggtgggggctacttaaatagggccatgggggagggcctctctgaggaggtgacatttgagctgaggcctcaccaatcagaaggaaaaagctgtaaagggtctgggattaactcaacctggggacttttaaaataatgtaaggtgttccagctctttcagaatttgtctagcacgttttccggttgtcactcccaggtgggctcgggaagaggcatctgtgcccagctcgtggcctgttctttgtacttgcggggaaggggtccccttctcccacagccatccccccggggcctgctcccaggtggggtctggttttcaccagaaagccctccatgcaaaaacaacaacaacaaaaaaacaccaccacaaaattgaatttgaattagttgccagcatttacattttaattctaaaaatctgtattttcgacttcgttggaaagtcagactatctggccatgctgggctgggatctggtggattttggtattttggtttctggttagggagggtatttggggtttgcccctccagcatgtgttccagtgtggagtggggatgggggcaggctcagtggggggatctgcagtggccaagggtcttggctgtctccagatggccggacggaccctgccacctcctgcttggggtgtgctggggttctttgctgcccctcctcccagcccacatcctcttgaactccacggagaccacctccatgtgaggctgggaagggaaacctgcctttgtaagtggaatcaggtgaaatcgggctgtgactgtgtcagtcagaaactaaaaggccctgtcacacccgtggccaggaagactgtcaccacggtggcatgcaaatgacagagatgcgtgggacagtgtctaccaagagacgagccaggtgagggcaggtcgtcgtgaaggagggaggtggggtcctccccacagagcagcgccatcccacagagaaacggcctctggggagggacgcgttccaaggaggccccgtgcagtgcagagtgggtggctcgaggcctgaatgccgggcactcggagcggtcagtgtccccgtgggaacagggctgctcgcagccaggtgattggcaaccttggatggtcagcccctgtgtgcgtgtgagggggtggccctctgctctgtcccttctgaaggcagctgtaagggctgggatctagtggattttggtatttcggtttctggttagggagggtatttggggtttgcctctccaggatctgtcccagtgtggagtggggagcagccataagggatggaggccaaagcgctcagcatcagacaagcctgggcgaaggtcctacttcctgccaggccagtgcctctgagcctcagtttcctcatctgtatagtggggttaatcccaaccatgtatactgcctgcctgccatgtgccaggcccttcttacacatctttgattgcttgagggcagggactttattatccacctttagagttgagaaagaagaggcatagaaaggttaaaccacttaccgggggtcacacagctgctgttgcagagtaaagtctccagactcaaacagagcactaagccccgccctgcgcaccaacaggtgctccaggaatgtcaggtgccatttatcaccctcatcacctgctgggagtgctcgtcccatcattcaaaccccgtgagcgtgaagtgaggggacatatgcaggatcgagtgtactggcaggtaacgtaagtaaagtaataaccacaggatgatattcacaacccatattagtgctaccaacagccacatctgcctgcttctctgggcccaggattgtctgcaggctcccaggagctggtcctgactgggtcagaagaaaggtctgaggttatgagaaggagtagcttgcccagctcatggcctgttttgtacattgggagtccctgtcccccacagctgtccccatgggcctactcccaggtgggcttgggagaccccagagctgcgcgcctttaggccagggttctgccgggtgctgggtgtctgtgggggtctcgcccaccccccaaccctcttgccctgccagctgctggacacacagcaactgcagggcatgaactctgagaccaggacctctgcaggtcctgggaggcagaagttgcagtgaaccaagattgcaccattgcactccagcctgggtgacaaagcgagactctgtctcaaaaaagagaaacagatatttatatgagacagtctgtagaggtttgaaatgcaacatgatccatcatgcggagatttttatagagaattaattgtttcagttcagtgtgaagggacttaaactcctctcttcactagaattttccaaactgttaaggggacatatgtaattgtcacctgcatcacatgcaatcaggggcccataagaagaagtgaaacgttcctttcttacatgattgtttttggtgaattgagcagttttgtattcatcattcaaaatgcacaggccaggggaatgcccaatacttctggctgcctaccctcccactgcaactaacgtaagcaggcaagcaatggctgttgataaggacacaacggtcatcatcacatttcaggggtttttgtttgtgtttgtgtgtgtgtgtgtgtgtgtgtgtgtgtgtgtgtgtgtgtgtatttgtttgttttgagacgaagtctcactctgttgcccaggctggagtgcagtagcaaaatctcagctcactgcaaccttagcctcccaggttcaagcaattattgtgcctcagtctccccgagtagctgggattacaggtgcccgccaccacacccagctaatttatgtaattttagtagcgacgggatttcgctatgttggccaggctggtcttcaactcatggcctcaagtgatctgcccacttcggcctctcaaagtgctgggattacaggtgtgagccaaaatttcagggttgtttgtttgtttgtctttaagacaggcgctctctctgttgcccaggctgaatgccgtggtgtgatcatggcccactgcagcctgaacctcctgggctcaagcgatcctcttgcctcgctctcctgagtagctgtgaatacaggcgcatgccaccatgcccggctaatttttgtattttttatagagatacggccttgccctgttgcctgggctggtctcaaactcctgggctcaagcgatccgcccacctcggcctcccaaagtgttggaattacagacatttcagtgtttttaaaaaatcaaaaaagcatgactggatacaatcaggatttcagtagaagtagaaaatatgggaatgtcagtgagcaaataagtgcagagagaacaggggatgagaagaggaatgtgggaagatgggaagcgctgggcggagaagaggatggggacgggctggggatgaagtctggagtgcaagctacagtcaggaaactgaaagctgcccaaagcattaagattgcccaagccagaagcacacgaggcagttttcaagagagtaaggagcaagagatcattaaactcactcaccaggagagacaagagatggtgggagtaatttaatgagagaggccttgacactacaaaaaaatctaaattcattctttgcctgactgttcacaagggaggagggggaagcggttgtcttcagaaaacatgatacatttttcttaggcaaaacttacagagaggaagagatgggaaaaagaagcaaccgaggtgatgggaaatggagctgatttattcttggtgttggagcggcagtttctctaacacagataaactttaaaaaccagctcagacccatcccttgagccctcgcttgtccctctccacaggtcccagcccgttcagagttttcaaggaagcagctcccaggctactgccaccttcctgggacctgtgagcccctcatcacccaagctggcagaatccctccaactcatggctccgtgaaacctgagtgcctgcctccgctgaccaattccctgggtggattttcttctggtggtcggaaaactgtatcagtcttttccagatgtctggcattacattctgtcatttggaatacagttgattcttgaacaatgtgggagttgggggcaccaaatcccacgcagtcaaaaatccacatataacttttgactctgcaaaaacttaactactgatagcctactgttgaccagaagccttactgataacataaacagttttcgtatgttaaatgtatcatatactgtattcctacaataaagtcggctagagcaaagaaaatgttattaagaaaatcatacggaagggagtatacatttactcttcattaagtggaagtgggtcaccatgaaggtcttcatccttgtctcttcacattgagtaggctgaggagtaggaggaggaagaggagggtttggtcttactgtctcggggtggcagaggcagaagaaaatctgcgtatatgtggtctctggcagttctaacctgtgctgttcaagggtccattgtatttattacccagtgggctgaaatcaagataaattaagcacaggtaagtcccatttcaagaagtccaatacatamaaatctgcccatagaatactcaaatgaaacaaccaaaagagacccaaggctcttttggatccaatktcctcaacactgaagaggagaatgtggccctctgagaggcattcagttggactcatgtgtagtgagaytgctgtttctttatctagggtctgggcacaggagcgtgtacctggtgaggattaattgaaatgtactcttatgatctgggcacgtttcttttcttcctctttctcttctcctcctcctcctcctcctcctaccccttcttcctcttcttttttttttttttttaagagatgaggtctgactatgttgcccaggctggtctcaaactcctgacctcaagtaatcaacccacctcagccccgcaaagtgctgggattacaggtgtgagccaccactcctggcctgggcacttttcttatgtatgctatcattcagtatcttttactcccagggggattttgattgaggaagagcaaggcattttttgttttgttttgtttttgagatggagtctcgctctgttgcccaggctggaatgcaatggcacgatctcggctcactgcaaccaacctcgtctcacttgtcctcccaaagttctggcattacaggcatgagacatcgtgcccggcctgagcaagacattctttaaaggtgagccacccccctgcgagggtgtttgagccactccctcaggaaccacccattcctggttctttcccacgggatttgctccagcctctgctgctctggcttccccagcttcccactcctggctcccctcctaccctcctgctttgtcacgtcccctccagatcccccaaggaccctggctgggctggctttcccatcccagagtcccctgtggcccccactgtcttggctcagggaagcctctttcccagacaggcccgtcctggccaccaccccaccctccatcccccagatggcacacgtacaagtccatcgcagaccccatcagagcccagatttctttggtgaagatgtgacttggcacagatgaacccactctcttgaaatttcatttctgggctgcataacccagcggcagggcacagctagcatccagaccccctgtaatgatttagagaaggaaaagaaatcttggacgggcgtggtggctcacacctgtaatcctagcacttcgggaggctgaggcaagtggatcacatgaggtcaggggttcaagaccagcctggccaatatggcaaaaccctgtctctactaaagatacaaaaattagccgaaagcggtggcacatgcctgtagtccaagctacatgggaggctgagacgggagaattgcttgaacccaggaggcggaggttgcagtgagccgagatcatgccattgcactccagcctgggtgacagagagaggctctgtcaaaaaagaaagaaagaaagaaatcttagagcccaggaagagaacaagaacaggcaaggcagacagtgactatcagtcttccccagtcagctttccaccctgcagcctccacggtctttctccatccagctccacgcatggtcactccactgcgtaaaaaccctccagctcctgaaatggaaaaatacacttccgaagcggcgtgctcccatcactaactcccccaaaaactcaccgtccacaccctgtgcatattcgatgttggctcttatctttaatttcctctccccattttatcttggcttatttagggttttttttttggttgtgttttgttttgttttttgttttttcctattttttgagaactcagtacttttaccatcgcccttttgaaaccctggagcaatacaagcatttaagactataaattttcttctgagtacagcactagccgagtccctcagatgctggtgtaaactattcttgttgttttctagaaaccatcattctagttttggtttctgctttgatctgggagttatctgggagagagttccttccccagtaaaaggcactgttctctgtcccattcaatgcgttttgacaaatgtgtctactcaagtaaacatcatcccaatcaagacacagagcattcctagcagggctatctttttttctatttatttatgtatttattgagacagagtctcactctgtcacccaggctggagtgcagtggcatgcgatctcagcttactacctttgtttcccgggctcaaatgagagctcccacctcagcctcctgagtagctgggaccacaggtgtgcacccccacatctggccatttttttgtatttttggtagaaatggggtttctccacgttggccaggctcgtctggaactcctgagctcaagtgatccacctgcctcagcctcccaaagtgctgggattacaggcatgagccaccacatctggccagggctatctctttaccatttattttaatgtcatttgtaatgatcagagcatggcctataatctttattttttaaattttgtaaaggtttcttttgtattcaaagaaacaaaagaaggaaataatttattaaaaattcttaagcatcaaatatcctcacccttgtgtacatttccagctctgtttccgtatcccttccatgaatttcctcttcactgcgctcctaacctggtctatccatccttaaactatagctctaatcatgccccaaacacaccccctctttcaatagattgtgagtagctgaagggtccgaggctgcatggtttccatctctgtgtctctgcagctagaccagtgctcaatgtggcagaggtgctccaccaacattcactgactacaggtgaattaaatacacctgtgccgtggggggacccaggcaggagggcaggtggttcagagaacacttcctgcagctgcagcctcatctctaccttggctccattcacagcgagatatttcagattcttcttcagagagcctgaataattaagggaaaacattctaacattcacctattggtttttctgccaagccccagtggcttgaaataagtaaatcatttaaaccatcccatccttgtgtctcggggaaggtggtgatagacagggaatcgatagattcaatcaggggagtgagaggcatgcggataaaggtccctggccagggcctgtctgcggccctcatggctggagatgcctcggaaatccaatcagggctcttcacaggggacatcaccgctgactgtcactgcattcttacccmtgagsyrgcmgagggtccctgccgagagacagggacacgtgggctcaggaaataaagactcaaagcctccacttaccccacacctcagcctccgagggatgcggggtcacctgctgggagggaggggcagaggccwcwctgggggtggcacatgggtgggacccggtcctgcctggctgaatgtcccccatgctttatctctttcmcaggccacctggattttaagagcactcacctgacgccctcatgccccagatttccagcccggcagcacccttgactgtggctgccaggctctgtgccatctggcccctgcctgctctcctcttccacctcctctgctttcctcctgtttcactggcttctctctgctacttttttttttttttttgagacagagtctcattttgttgctcaagctggagtgcagtggctcaatctcggctcagtgcaacctctgtctcccgggttaaagcgattctttcgcctcagcctcatgagtagctgggattataggtgtgtgccaccacaccaggctaatttttgtatttttcatagagactaaaaatagttagggtttcaccatgtgggccaggctggtctggaactcctggcctcaagtgatcctcctgcctcagcctcccaaagtgctgagatgataggcgtgagccaccacacccgggcttctgctacttctttgaaccagggcccccacctcctgtcaggcctgtgtgacgctagccccgctgcctggaactcccttctcccagccccgcaacagccctcctagctcaggaactcccagaggataaacatgagatgatttgacaaagcaaacggggctagcactaagatcgctgaatcctgtagtggttcttctccaattcttcagtcacctcaaagaaaacaccttgatttggtgctgatgcgcctttagctcctttccagaccttgcatttcatccttttgaacaaagaaaggacaggccccgggcttcctgcagaatgaagcccttctgtttaggtttattgcttttagttctacagtcatcatccttttgcatggaaaagatgctggttttctatttactctggtgatagagttttccttttgaattaaagtttcttaataaaaacaaaaatggagttgctaagcaacatacactgatgttagagttggcagaaatggccaaaggaccggggcatggatgaaatcacactcctgggttgctccaaaatgttcagtaaaatgtgtctctattagctacttggggatgtggaacttggagatgtgaaaagcagaagaagaagcccacgatgtggttggatggagggacccttgcagaagcaagaagggcagctgtgagatgcagagtggagaattcgaccttagcagaggccagaaaaaagagctgggaggagcaggaaaaatgtcagctctgtgaatggcagaaatcgtgacgatgatgattttggacatcccgtgcgctcaggatttaaacactggggttacaataagattctatggtcctttcaagccggaattgctggtcacatgaacaaatttacggggaaaataacagccacgggtaactcaggcaagtcaggtcccccaggctatggataaacagtcatgcctgagtcagcctctttcttgaatattttttttccagttacctgagccaataaatccacctttgccttagaccattggggtttaatttttcttcacttagcagctgaaagaatcttaacttacagaaaccacagaacatagacataattactcttccattttacagcagaggaaactgaggccccacctccttctatctttatcctcggatttttgagaccgttgccttctgcttcatcccagacatctgtaccctgttttctcccatccaaagagaaggaaaaaaagacaatgttcacaccccactggccatgttttggtcacaaggaggcctgggaaatgcagtctttattccaggcagctaggctcactgctaccaggagggatgctgaggtcatccagcagtctctgccacagctgggtaaccccagccctgtccctgtcccccatggggcagcttgagtgcaggacagaggacctgcaagccccacaccaacctgacagggcaccttcatcacatggcctggccaggtcatcctcacaggaggacagcactagggtctgggcaggaccaaggctctggacaggccagagagaaaggtatgagcagtgacgggagcaatatccaaaaaggccccacccctttcctgggtgcccagggaaccccagggtctccctcagtgctgctggctccttcctgcaccaggcacctgagacagaggctgcagtgagaagaccccgtggtcagtcactcttgcattggatgggaaactcctccctttgaatgaaatgctaattatagcctgcatgtgtgcagtctgttacctgctaaaaatatgctgtcttattcttgtctgcacaggtgcagctgagttgggggaaatcatgctgtttttagcactggtataagcagacaattgaatcctagactttggggacggggtctgcctgggaacttgtttccaggagtgtgactgaagtgaagggccagtcagaggaggtgccgcaaccccggggcacagcagagcagtgccaatgtgggaggaagcatcttccaacagtggtatcagcttcacagtggaggcagcctcagcttccagggctgagagacatttgtcatcttggcaggagggaggctgttaaaacaggcactgggggagcacaatggggccccaaatccacccaagaaagccccaaaacagggatgttggaatgagatgaggaggaaagggtcctgaagacagaggaggcaggtatggggaaggattgagagatgtcactcattcattcatccattcattcattctacaaatatttattgagtcctaccacatgccaggtactctgctaggtgctgggttgaaagggacagataaggtcgctgccctcatctttattacaataatatttctatacatattgagccaggaactgcccaaggcactagagacacacatcaaacaaaaaccccttcttggagcaaaaattctaatgggggaaggaggctctgatgtcccctctcccaagaacaaatgaacacggaaatgatgataagagttggggactcccatgggaccctcccgtccctgtccctgggtctccagttcagccttcgagagtccaggaggtgtcggctttcccacctggccacatctgctgctcggtttgtctcacatgctgctcaaagactcaaaccagcatcctcagccctgatgcaccccctcactctgggggggcacaatcacaggatgcaagtgagccagatatccagaaaggtgaagacctcctggatctagacaagagaatccaattggctgagccaaatttgcacacaacacctgcatgggaggcaggttctctgggttcaaatcccagcccactgcctaccacttactagctgtgtgaccttgggcaggttatttaaacctctctgtgcctgagtctcctcctctataaactgaggataatgatagttcctgttacataggattatcagacaagttaaggcagaaaataccagtaaagtgctcagtacaccatctgcccatgggatgcaagggtttaaaatgttaggcatcatcaccctcattacggttgcgttgaattttatattgattattggctttatattgattacttctgattattattgattggttttatattgagtattatatggcatctgataacattctcatgaccttccttcctggctccacagtgtcatgtgttttttatgctgggatcaattccattccctggatttgacatttccctgcagaaacgcaggctgggaagggagctctgaggtcatcccccatctttatcacaatcatcagccacagatgtccctgagtccagggcaggtgctggcccatcatcccgcaggtggttccactctatactctacagaacatgtgcttcccattccatcttccagcatctgctgaccctgaatggctccccagccttgccctggcctcccgtcctggtcatgagcagccccttccccacacagcagttagaaggatccttctcatgctgaatcagccctgggcagctctctgaccacaaccttccagtgtccccatcacgggactgatgggccaggccctgccccctctcagctcctgtctctgcccaagctcccctcacacctgccctcagtccctccagcctccctgctgtgtccaaccaccaccccctcttactcccagcttgtcccacctcagatccttctaccaggagtgaccttacttaaatatgcccaccctccactggctcctcctcatcagacaaggcaggtcaagtgacaccacctcaggagccctcccaactcccaagtccaatgtcggccacactctcccatctgtcatgtcactctcccttgcttcatgggtctaagatggctgccaaactccaaccatcacactgacattccagatagcaggaaagcacaaaagataaagaagagaatacctctgtctttaaggacacacccttaaagttgcacatgatgattttgcctactttcccactgtctaggactaagttcccttgccatgcttagctgcaaaggggctgggaaaggtagtcatgactctgggtgaccataggcacaactgatagtcagcagtagttctattactaaggaagaaggggaaacagctaatctgttagggaaccacttggactccctgccactgccacctactgactatttcaccttgggcaagttactggggatctttgttgtgaatctcagatttcacatctctgatatcaaatgcaaactcagaagatccagcctgttctgtcccctgtctgtccttgtggtcacacctctttccactcccccacctgattcactttgctcccagagcacaggactcctttgtctcaaatctgccaagctcattcctacccacagggcctccgcatttgctgttccctaagcatggaactctcttctgatcatttttcctaactgtggtaaattacacacataaattaaccaccttaaccatttctaagtgtacagctcagtggcattaactacattcacaccattgtgctacgatcaccaccatccctcaacagaacttttcatctggcaaaactgaaactctgtatccgttaaatacgactccattctccttcccctcagcccttggcggtcaccattccaccttgtctttataatctgactactctaggtacctcctataagtggaatcataccgtatttgtccttttgtgactggcttatttcgttcagcataaagtcctcaagcttcatccgtgttgcagcatgtgtcagaatctccttcctttctaaggctgagtaatattccatcgtagggatataccacattttctttatctattcatctgtcaatggacacgtggattgcttccgtcttttggacattgtaaataatactgctatgagcctgtgtgtacagatacctcttcaagtccttgctttcaattttttggggtatatacccagaaaggaatcgctggaccacatggtaattatatgtttaatgttccgaggaacagccatactgttttccatatgggtatacaattatacccccatggtatacccctatagtatacaattatacccccatggtaacccctatggtatacaattatacccccatggtatacccctatggtataattccatagggtatagccataggggtatacaattgacatttccatcaatagtgcacaagggttccagtttttccacaccgacaccaacacttgttagtttctgttttcttgatagtagacatcctaatgagcatgagatggtatctcattgtggtttgggtttgcatttttctaatgattagtggtgctgagcatcttttcttgtgtttatgggccatctgtatatcttctttggagaaatctttattcaagtcctttgctcattttataatagggttatttctttttttgttgttgagttgtaggagtttgtttttaatatcctggatattagccccttatatatatttcaaacattttctcccatttcataggttacctttcactctgctgtgtctttagatgcaaagtgtttaatattgctgtagtccaatgtatctattttttcttttgctgtctacacttttagtttcacattcaataaatcgttgccaaatccaatgtcatgaagcttctctcttatgttttattctaggagttttacagttttaggtttgtgtttaggttttttatccattttgagttaatttttatatatgataaaaggttcttttgtatgtagatatacagtttttgcaacaccatttgttgaagggactgttctttctccattgagcggtcttagcatctttgtcgaagatcatctgccctacatgtgagggtttaattctgggctgtctgtactgttcccttggtctacacacctatctttatgtcagtatgatactgttttgattactgtagctttgcagtaagttttgaaatcaggaagtgtgatgtctctaaccattcttctttttcaagattgttttggctatttgaggtgccttgaggttccatatgaattttagtataaatttttctatttccacaaaaaaattagaattttgataggggttgcattgaatctatagatcgctttggaaggtaagggcattttaccagtattaagtcctctgattcatgagcatcatctggtgtctgcatttatttgtgtctgctttaatttttcagcaatttttatagttttttatagtttttggtacaaatcttctgcctcttcaaatttattcctgtcttttattctttttgatgctatagtaaattgaattgttttcttaattttctttctgaattgttcatattcactgatttttgcacattgattttatatcctgcaacttgtcaaatccacttattagttctaacagggggatttgtagaatctttagggttttctgcatataagatcatgtcacttgagtacagagataattttacttcttcctttccaatttggatgccttttatttattgttcttgcctaattgctctgactaggagttccactgctatgttgaacagaagtgcttcttccactagttttcgctcagtagattccttctctgcattcgagtctcaactcaaatatgatctcctaacagacagcaatcccggacgctccctagtccccagtcccttgctatcacatcaacacactttattttccaccatttagtatgatctgaaattacactgtgtatttgtttaattgttcatttcctgttttgcttcctgcacgggggttccatgggtacagggacctgtccttcttgcatgccccatgcctaggatagggtctggcacaaagacattccttgataaatgtttgttgaatgaattggtcaaagatgggactgaggcaccagcagttgtaggctcccatgcccctggcaatgcttccttctctcaagagttttcttctctgcccgcccacaaaacgtcttcatccaaataggttgattccttgccatcctctacaattgctctgagcgactgcagtcggtcatctaagtggggatgcatagcagtggcccaggattagaggtgcagaggacatgcctttcttatcagggatagtcctaataacaatatcttatttacaactcacttcacagcctgcatgtacttaagcatctgccatccctgaaagagaaagataaacacaattgagacatttaggcagaaaatgaagggaagatgaaaaggtttaaaaatgagcaagggatgcattttccagcattgaatgagagcataggtttcttcctggtttcaagataaaagagaaaaacctgaaggagaaaaacactcaaaaaaggtgatgctttatcctgaagattagcccacagcagactgtcagggaatctatagtaacggagactctaggataaatttttttaaattaagaagcagaaggagaaaaggcagcagccctgagcctcgactttggaacgtcctccatccgtctgcgtctgtcatcagctggcagagtgggtgcatggcagggggagccagggccattgttcctcccctcagccctttctgctctcagtttagggataaccaatgtttgatggcttgtctctcaagagcgattagaagcaaagctgctcattacaggctaaatctcaaagcgctcctacagaaatctcacttcctaagcccaaagccctgatcccgggctgcattttgacaaggctcatctgtgaccctgaccggcaccagcggacgacgatgggctgacacacacagcacttactgcgggccggggactgcagttctgagctctccgggtgcatgaacttgcttaatcctcactgagctcaacgatgctattgggattcagctcacagatgaacagagccgggctgggcagaatcaatgctccctgggcccatggctgcaggacagcggagccacttccaggacccctggccagcaccaggcccacaccactgaccactgcccactgatggtgctcttgacagaaaaggggcctcagtgacagccctgataccaatattgctccagatgcctctttccaggaaaaagtcctcttctgagacagtgaatccagtgaaccagacttttccagggctctcagaattttggctgcattcccacagttagaagtgttggaaccaatttgttctaaagagagtgtggaaatctctatgaaagccaccagtcaccaccctaacatgaaagagggacattcgaaaggagatttctaggagggaattagcaggaggagacactttggcccaagacaaagagcagggcttcgagaaaccaccggcagaggctgggctactctccaagcaggacagcatctctcagactattcttcccccaagagtgctgggaacctccgagggcagaggggatgctggactggacccatctgggaaggggtccgctgagtgggggttccctaaggctttacatggggcaggaattgaaggtgaggtttgcaacaaggggtgcattcccagcgccccagtgtctgaaaagcatgcagtatggagccccagcgtgtttctgaatgctcctctcccaccgtcccatgcacctattttatgtcaggtaccgttgaagcagatcctgagaggaggaccttcatgcaaggactggatctaggatctgcaccagagaagacgagaaaggggtagggagaggggatcaggaagagcaggaagccgggccagggtgcggccttaagccaagccccttagggagggaggcaggcttcagcccaccctgcaggggaatccagcccagggtgtgagtcacagccactccttgtcctgcctcagggcagggagctgggcttccggacacctgcactccagacacaaccagctctctgttgaggcaaggcagatccaggagccccagggccatcctcttatgagagccagagctgtggcccatggaggggaaggaaggtacagccaccagggccaggcgatgaacacaaaatgcagaagagaatcccagggcacagaggctggcacccccgctggccgctccttatttctctgctcactgcctgtgggaccctcagcctgtcgcgcgccctccctgagcctgtttccccagctccagagtgagaatcgtcataactgccctgacctccaagggctgccataaaaccaggagaaactgtccagaaaacccagcacagctgggaccagcagcgggctcattaagaaagctaaatatgctaaagtgggtggggaatccaaaaaaaaaaaaaacccgtttacactcacagctttatacagttaaaagaaaacatgcaactctcctataattgacgaatattttcatgccagggctaatgactttcttcataatgtgggcctgctgttggattctcccattgtctttgttctttatataattctacaatgttcagttttggcttctttgaagtggaatgagggtatgaaaacacttgccacgcaatccgggtgcaggatccttccacaccagcattgtccagtagaaatagaatgtgaatcacaaacataatttaaaatgtttcagtaaccgcattaggaaaaaaaaactaaaaagaaacagaataaattaatttcaatgatatattttatttaacccaacatacctaaaatattatttcaacatacaataaatgtaaaaatgaaggtcatttacatttttcattctaagtcttcaaactctggtgtgagttttacccttccagtgcacctccatgtttatcagatatacttgacttctatttcgattttagaaatttgacagctgaaaaagtagattcacataaacaactatccccaaacatatttaaaagctttccaataactgaatcacatatcagtttttaatcatttaaattaattaaaattgaacaaaattaaaaattcaacttctcagtcacatcagccacatttttaaaaaatattttttaagttagagatggaggccgggcgcggtggctcaagcctgtaatcccagcactttgggaggctgaggcaggctgatcacctgaggttgtgaattcgagagcagcctgaccaacatggagaaaccctgtctctactaaaaaaaaaataaaaatacaaaaaattagctgggtgtggtggcacatgcctgtaatcccagctacttgggaggctgaggcaggagaatcacttgaacccggaggcggaggttgtggtgagccgctatcatgccattgctctccagcctgggcaacaagagagaaactcagtctcaaaataaataaataaataaaattaaataaaattagagatgggggtcctgctatgttgaccaggctggtctcaaactcttggcctcaagctattctctcatctcggcctcccaaagtactgagattgcaggtgtgagccaccacgtccagtcacatcagccacatttaatgtgctcagtagtcacatgcagcaatgactatttctttcaaccctwttttttttttttgagacagagtctctttgttgcccaggctggagtgcagtggcacgatctcggctcactgcaacctmtgcctcctaggttcatgcgattctcatgcctcagcctcctaagtagctggagctacaggtgggtgccaccatatctggctaattttttttggattattagtagagttggggtttcaccatgttggcaaggctggtctcaaactcctgacctctcaagtgatctgctcccmycagcctcccaaagtgctgagatwmcaggctctcccacccaggctggagtatagtggcacattcatagctcactgcagcctcgaatccccaggctcaagaaatcttcccatctcagcctcccaagtagttgggactacggttgtgcataccacacccagctaattttttttttttttttaagtagagacagaatctccctacattgcccaagctggtcttgaattcctgggctcaagtgatcctctggcctcagcctcccaaagttctgggattacaggcatgagccatggtgccctgcctgcagcaatgactattatattgggcaattactgggcagttctcaatatttttctgatctctttttcagctttttgcccttaagagatctttccagacaattcaacttggtgttcataaaaacagcaactccctttctttttcccctcctaattatccgtttgctatgtttactaagttttgcaattgcaatgccaggtatatccagagtaaacaggtttggaaacaaacccctgaatttcagcaggcagagaacacgatgggcatttcagagagtggcagatagccccaagctgtgggcttgtccctctacttacagaggaacggagggcttggaagcatcaggggagtgagttaagggagttgcacagagaagattctactctgcattgaaagctctaatttcagtgagtagcacgcaaaaagtaattgttgtcatctctgctagtctaaaagcacaccactccaccaaagccctgctcagacggctgcctaaccaatatccttcttcacgttcctcctcctgacagaagcctgactttgtcctggtgtctacctgttccccatgcagccccttggttcaggggatgctgacgtggtcctcagcttcagggtcatcccaattagtctacagttactacattcagcaatctcctggtgattgtcagtggtcccggaagggacacatgggccaagatggccaattgtactgaagacaaggagtacatcccacacttgaaggagtgatttctctctcaatgccaggggacctgtgatagggacaggaggcagagaaactctgggcagaagagggcggtccccagcaagggtcctaccctcaaacctggaaccatggcccgaagtgagaacacggattcctgttttctgacttgaatgttgcctttccaaaaccacacatgacacgccccaccccccatcctgtgccataaaaaccccaggcttctccagcagagaagaggagaagtagctggacgttggagagaagcagcttgacttcagagggacggcttgacagtgttgcttcgaagaggatgaagagaatgttccccagcggggaaagattatcttcccgctctatcccttttccatctcccctttcatcggcaataaaatcctccatattcaccaccgtccaattcgttcatgcgacctgatttttcctggatgcaaaataagagctcaggtgccacaggtgtggacactaaaggctgtcacactgaccgtctgctctcgctggtggagagaaacaacctcatgcaaaaaggcagagggcccactgagctgtttaacacttaagccatccgcggacagcaaagctaaaagagcactgtgacgcccgtcctctggggtttccgggtttgcaggtacccccctcccttagacgctgctgtggggccagcacagagtttgctcctgccagcgcccaaaggcactcgccgcagctcctgaacccgctcatctacatgctccctcccacaaggggttgagcacaacagtgagtggagtttgccctgctggcaccgaagtggccgggtagctccagcttccgatactccaggtcccacctgtgaaggggtcgggtaaaatttcctgcttcacctggacaagaagacatgtgccagttgctggtggcagccacattgtgacatcccacaacaggcgagggagactggtggtgttgcagagccactgaatcaacccaccctgaagtccacctctgttatgggagataacatactccctcactgcgtaagccagattcattaggggtttcagtcacttgcagccaatagcaagctgactcacatacaatccctcctaaaaagacttctctgaccctctccgttctctggaccctgcgacctttctcaccgcaccaacccactgcatcctgcgtgccatttatgtccgtgtgtttctcccaccagccatgggcccactgaggatgagctctgtttcttcactcttctccttagcccagggttctgcgattagtaggtgctttgtaaattccatcgcacaaaaacatattttattgcggttgctttagaaagctggatagatgggtggaaagcactcttttgttttttgtttttcagaaactcaccactgtgatgtaaactgctctgttaggtgacactgcagtacttctatgccagtaaagacaggtttgaagatgctttatttcactgggacaaactacatgtccataaatgtcccatccgtctttctcccacttgatgatatttgcagactcagtaatttcctttctgcgatgaacatccctctttaacattcaaactcccttaaacagatgtagtgctttcccacaaacccatctggacaggtggcagccacgttaaatctcgtgcatgggactgcagcactctgggtactcatggaatcttcttccattcattcttgttgttgttgttgttgttgttgttgttgttgttgttgttgttgttgagacagagtctcactatgtcacccaggatggagtgcagtggtgcgatctcggctcactgcaacctctgcctccctggttcaagccattctcctccctcagccttcctcccgagtagcccggctaatttttgtatttttagtaaagacagagtttcactatgttggccagccttgtcttgaactccttacctcaagtgatccaccacctcagcctcccaaagtgctgggattacaggtgtgagccaccaggccgggcttcttccattaattcttttttttttttttttttttgagatgaacgttcactctgtcacccagactggagtgcagtggctccctcttggctcactgtgatacagttctgatgaggggaggagggttcttgtctcatgtcaaattaggtaagatgacacggacacacatggagcggttttaaggagcggagtgtttaataggcaagaaggaagggagaaggaagaagctcccttgtacagaggcagaggaatgggggctccaaagccgaaagaggaggtccccacctgccatggataccagccaggtatatatacagaggctggagggggcggtgtctgatttgcatagggctcaggggattggtttgaccaggcatgtcattcatggtagcccatgaaaaagctggccctcccaccctagtcttttaatatgcaaatacagggcgccacaatgttctacacacgtggggatatgtgggggcggccatgttgccaggaacaggtcgggaaagggcaagaaggctcgcgacccagtttctaatggctggcatttgcatatcaaaggttgcccgcctggctctaagagcccgggctttacagaaacttccggagatgctttaacaaacgaaaacttcccaaggaccccttttcctttctatctgcctaaaataatttcttaataactcctaccacaacggcaacctctgactcccaggttcaagcaaatctcatgcctcagcctcccaagtatctgggactatgggcgcgtgccaccacacccagctaatttttgtatttttttagtagagacagggtttcaccatgttggccaggctggtctcgaactcttgacctcaagtgatccacccacctcggcctcccaaagtgctgggattacaggtgtgagccactgcacctggccccattcattctttccccgcaggggctgcccatcctttctagatatgcacccccaccattagaatagaatccaggtggcgtctttaaaagagaaaccaatactgccctgggcaactttacgttagggaagaatgttttggatttaaatcaaaggttagtgtttagggtcccttctgcaggtgggcaggggccccagagactaagggtggagacactgcttggccccagggtcacctttgggcatcagggtcacacagtgcacactcctgcaggtttgtgcaggtttctgatgccccttatcttccctccaagccggtcactcccatttaaaaaaaaaaaaaaaaaggcacctacaaccttctggcgattaggccaaatcttagagtcagcataacccttctctttctcttattcctccatatcccaaccatctaccaaacctgctggctttagcttgtgatgatggctaccatgctatcgcctggccacaccgctccgaatacggaggcctgggcgtccatcatcccttcttgactgtggcaatcacctccttgctggtctccctacatcgactccctgcattgatcctgcacaatccatgctcacaggcagccagagggatccttttaaaatattaaggcaaaatacataaagtcctctgtgccaaaccccaccccatctatctcagaatatgacccagatgtctttgccatgacccatgaggccctccataacctcagctcgagctcttctccttgttccctccatgctgaccctcctagaacacccccagcacactccaccacagggcctttgcacatgcgggtccatctgcctggaaacttcctcccctggatgtgcacatggaagactcatttaattccttcaggcctctgatcaaagggggcgcatctcagagaggacttccacatcccccagtctaaagtaaaccctccagccacttgatatttcaagtatatgtgcacacatacacacatatgtctatgtgactgtacttgcgggggcaggctgtacttgtttttcactgcccctcccaccccgccagctccccgagaacagggccttggtctttttcatccacagttgcatcgctggtgcctagagcatgcctggcacgtagaaggtgctctgaaaagagctggagtgtgattaaaccgtggaatcttctgagagtgctgcctccgcagagaactcggggagacagaagctgcctggcccagggcatctgattccagggcctggacttcttgtctggtgtccctccaggaaggtgtccctaagagaataagttgtactttctcttctcagtacaaaggatctttttgtaattctctggcatgggaaccattccagaagccccagagtcaccaagcttggccacactgaacacacttcctagaacgagcctcaaatggttgggtctgcccgtctccagacacccagttcctggacagtcaccgcaggcagctcccctgtccatcaggacagagctggacaatcaaggtgtggggcttggtgcatctgagggttcatctcgggccacccccgctccagtgaggaacctgcaggccaaggaggggacgtgactggccactgagggcattgcaggcaaagccggccaggaccggctttctcccaggccagggcgctttcctgatggaagtttccggaagccttcatccaattccattcgttcactcttcttgcaagtcagcagggcagaggcaggggcagcagagccccacttggcaaatgaagaaactgaggcacagccaaggtcagtgactcacctttcttcaaagagctcattactgcggggcccccagtgagtgattacagagtgggtcccgagccatggcctgggctgggtcctggttctaccactttcaagctgagcgaattgctcacccctgtgtgcctcgttttctcacctgcagaacaggtaataagcataattgacccgtggcttttacgagcacagtgaaacccaggcatcagcaatgggaggagcccagccctggaggcagatgccagttccaccccacccggccctccgcccaccagctcccaggctcccctacccctctgcagatggaggtagcggcagtgcctcccacacagggcagttgcgagaattcacgatggtgttttgttgattcgatgtgttttcgacgcttcttgtttcgttttgtaaatcaactagagcagtgcctccacacggcaagctcgatgtaagtatttgttaaataaaaatatagagaatgcatgtaaggtgcttagaccagtgtctgatgtgagtgatgcttggtgagtttcagctgctctgacttttagtgacaaggaccagagcgtgagtcgtcctgacccccctacttcccttccgtccatggtaacccccaggccacatctcaggctctcagggtcgcccagacaccgtttctccttggaggtcgccttgctctctctgctcccatatcccactgtctgcctcctccagacactctgtctcccacacatgcgcacactctcacgcccaacatacacactctcacacacacatacatacattcttacacacaggctcacacactcatacagtctcacacatacacacacagactcatacacacacacacatacacacaggctcatgctcacatatacaggctcacacacatacacaggttcacatacacctacacttacacacattcacgcacacatacacgcacacaggccccaacacacctacactcacacatacattcacacacacatgcatacatacacacaggctcatacactcacatacacacatacacacattcacacatgtacagactcacatacaccctcactctcacgcacacagtcacatacacattcataggcgcacatatacacacactgtcaccctctcacacgcacacgtgtcccctgagacacgtgctacccaccgcgtcctccctgaagctcccccccctccctgctgcccagatgcccagcttgggggctgcctgcactgccaggactcagctgacgccctggcccggggaagctactgggactcgcccctctgctgagacaaaacgggctgcacaggctcctcatggtctccctgccccacccactcctggctttgtgcccttcccagcagccataaccaaccccagccgtctgctcaggcctctggtgcctccccaaacccaacccagagacgctggcagtgctgtcaccctgtcaccaggcactcaaggcagtgtacaactgcccccaggcaggctggactctggtctcagtcagaacccggagaaaaggccacagactccacggggcaatggaaagaaacggatggaccagtgctaaaaggctaaaaggcgaccagctcccacagtgcggcctgagccgtggaaggacaagggccacagtcacacccataatcctccttctctctgctggaacacctggttggccggagtcacccgaggggcttcgggagtgccgtggaggaggaagctgcggtccactctgctcttgcactggctcagcacagaccatgggctcttctgagacagcaccaggccaggctcagagagggccaggactctgttcccacaaagcaccggggctggtgggggacccacctgtcaacagtcaatagcagagcaccagcatgaaataatcctggagtgggggtggccccagcaggaagccctcagctcccactgggagtgtgttgcagggggtggtcggggactcaggtggggtggggggggtggtgttggagtgcaggccttccgagcatgagcaggacatgaaaagaaaggaggcaacaggggtggggtgggaacacagccagagccaagaacgtacttagtgggagcgagaaggcggctttggtggatagagtggacagggagaagtgagaaccaggttagagaggggctggaacccagagggcagaggcctgagatgcccatggcagagcgtgcactatgtccccttgatttaggcattgcctgccacctgtctcatggagggcagcctgggatggcattgaacactttaaagatcaatttattttttaactatataaatttatttcaacagcaaactttatatgcttaagtttattggaaaacattaagtagaaaccaaagcaacatcatcaattgcaggtaggtacatacgacggcctaccaaagacactaggcccaaggctggctctttcttggttccagatggagatgaacagtgttggaaaggtgttaagattattagcaccaaactgggactcttctccttgagacaatggactggctttctaaccatgtgtctccatgttatggcaagaagatctgagtcacccagtgtcacctgtcatcatccccaggggagcagatgctgttcgtgccctccacatagccctggaaccctccagcaggctcagagccacttctaactgccaatatcttcttctttttgcctgcaggcttttgtccatgacctcagcagtccactctacccacacctgtggcaggtgggaggtgccaggggattaacactcacctccaacaacccccaagtaataactcataggagttggtgtataaataccgcctgtccctcgctcctgggattcctctattgtgtgtgatttctccatgggactgaactccagctgtcctctgcaccagctggctgaatactacgccctgaattggcctcctccctttcctgttgcgcttcctaaagccctgccagagcttcctgaggtcacctctcaaataaactacttgctctcaaattcttgtctcggaatctgcacctgggacaacccaaactaaggcatcaaccatcagtgacatctgtcccacccaccctcaaggtcagaccccaaacctgagagactcagtccaaagagacccagaagacagcttggcccttataactagatgagaaatcaacccagaagaagcctgcatggcaatttataatgggaggggttggatttttctgtgaaatattttcatatggcattgattgctgacagtgaaactagaatgaaatcaatcagatctgcagttggaaaagctcactctggctcctgtcgtgaaacgtggatgtgggcggtgccctggtctgcacagggagctgggtcgggtaccactgcagttgtcagaggtgactggaggggtggccgcccttggcaggtatttaggaaggacaatcacaaggaatttgaaatggattaagccagggaaggagattgaggaggaggtgatttctgacttataatggatagaagtggcagtcactccaaaggcaaacacagcaggaggagcaggtttgggaaggaaggtcaggagttcagacccaggcacactggcttgagttgccttcaaaacatccaggtggagatgtcaagatgtctgttggataaatgagaccggaactcagaggagaggcaagaacaacagtgaccatcgccctgcagacataaatgagggaaagggtgtggattttaagagtcgtgtatgtatgtttcttttttctttttttatttttatttacttgtttatcttttgagacagggtctcactctgtcgcccaggctggagcacagtggcacaatcatggctcactgcagccttgacctcctgggctcaagcgatcctcccagctcagcctcccaagtggctggaactacaggcacgtgcacccatacccagttaacctatggttttgttttgcttttggcagagacagggttttgccatgttgcccatgctcaaactcctgagctcaagtgatccaccggccttggcctcctcccaaagtgctgggattacaggtgtgagccaccaggcccagccatgtttcttaaaaaaaaaaaaaagtttaattttaaagaagtttattatttcatttctatggacatggaaaaaaatgttgagttatgatacaatatacaaacataaaatttaccatcttaaacattcatttatagacacttgagttgctttcaccttttggctattgtgaataacgctgctatgagcatgggagacaaatctctcttcaagtccctgtttttcagttcttcggggtacatacctagaagcgggatggctggatcatatggtgattctatgttcaattttttgaggaactgccatattgttttccacagtggctgcacccaaaggttttacgttcccaccaacagtgtacaagagttctaatttccccatagcctcaccaacacttgtgattttctggtttttgacagtagccatcgtaaagggtgtaagttggtctggccaaggtttttgaactacagatgtcacaaagatacagagcaagaaaaggacttatgcaacatcataataagccagggagatgttctggtcatacctacatcattatcaacctcatgaacttggatcagttgggggtgctcttggctacaagtagcaatgttatgaaagcatttgctgtcttgttaataagaactccctgggctggtcttttctgctcagtcaggctcagccgattggtgacagtgacattgcccttcctggccatacgttgactcttcaatgccatgcatatgtgcgctcaggaccacacatagagcagcaggaagggggcatgaggcaggccccctccttccaagattctggcctttttaacaggaagaaagtgacttccccaaaacccagcaaatacttcctgacatctcattggcaagaagcagtcaagtgcccacgcatatgactggcgcagggtaagcggtgctagttaaagcagggatggctgggccccacccacagagtttccgattcagtgggactgggatggggcccaagatttggcatttctaacaagttccccggtgatgcagatgctgccagtccagggacaacacttcgaggaccactggcttcagtgatcttgagctgggtacgtgaccacccaaaccaatcaaagggaaaaaggaggtaggtggtggaaaatacaagactttctgtcacaaactctgtggagctcacttgtatcttttttgctcactagactctaggccccctgggagcaaggggtcacgaaagtcacctttttgggccttggggtcttgatacagttactgtgacttggtggcaactttaaacagatttttcaaatgagtggataaatgaacatgtcaccaaagatgtccaaggctgctgcaccctcaagtcaccttgatcaaaacaccctcctggaacccatgcaggcagcctccaaaacacaaagcaggctgggcacagtggctcatacctgtaatcccagcactttgggaggccgaggtgggcaaatcacgaggtcaggagtttgagaccagcctggccaacggggtgaaaccccatctctactaaaaatacaaaaaattagctgggcgtggtggcaggcgcctgtaatcccagctactcaggaggctgaggcaggagaatcacttgaacccaggaggcggaggttgcagtcagccgagatcgcaccactgcactccagcccgggcgacaaagcaagactcaaaaaaaaaaaaaaaaaaaaaaaaaaacaacaacaacaaaaaaaaaaaaaacacaaaacacaaagcagccccttctctaccaggacagcagctcccctacaaagcagctcaggtgtcttccctgtcagcctgtcctcccggggaggctggctccctgctctgcagtgacactgcagggtcagaactcagcctgtggataacccaagaacaatgcctgtttgggggtcttcaccgctgacacagagagcctgtggccatccatcccaaatagtgtctgttagttgcccactgggatgtggtcccttgttgaagtcaaagaaacaagcccttaattcactaatcgcctaaacagacaccaccggctgagaactccaatagccaggcgtgtgatgccttatgaccctgagtgaatgcagctgcaaacagccagtacctgttacatattccttagccacaggggaaacttctggaaggttgctagcatggaatatgattaatgaagaagaaaatgccttatccttctgttctacattcacactcacatgtgatccacgcagtggtcctgaaaggatccaaggctgggggagatctgggagtccgtttaccgacaaggatctgctactcagagctgacgtcccatatatgtgcagtgaatattcaatcagcagtagctgtgatactcataaatcactcgctctgaggtgaaggggaaccgactaggataagccaggctcaccccagaggcctctgctgcaagcctggttggcagcccagcccttgtgggtaccaggacctgccagagccacagacgaccggatataagcacaaattgatgagtcacccaagagccatcgcagggtgaggacagacctgggtgccaagtgggcagcgattccatcaagtcctggcagaggaccaggctgtgacggacagaagacactgctcaggtcagactcacgtggcaaggcaaggtcttgctggaaggcaggcaaggaaatgctccagcaggagcccagcagagaccggccctgggtgctgatcaggaccaagctggccccagcctctgtccagggttgtacagggctcagggagctgcgccaaggtggaacaagagtagaggccgggggcggtggctcacgcctgtaaccccagtactttgggaggccgaggtgggcagatcacttgaggtcaggagtttgagaccagcctggccaacatggcgaaaccccatctctactaaaaatacaaaaattagctgggcgtggtggcgtgtgcctgtaatcccagctacttgggaggctgaggcagaattgcttgaaccaggaagtcggaggttgcagggagccgagatcacacccctgcactccaccctgggcgacagagcaagactccatctcaaaaataaataaataaataaaagagtcaaagccctgggtcctcttctcccctgtgttagccttactatgtgttcttgggggtggtgcttcactcctctggaacagtgagcctcacatacctgactctgggccatgcaggggccaggctgggcctcctcacacccactgactccctgctagcaaccccagttcccatctcccatccccccaccctaacttccagggcagataggatgtatgcactggggagtggacacagtgctctctccagccaggtggaaatgggaccagcacctccctcgtcaccccctccccagacactgtccacagcccagatgggctttcatgcacctcggcagccggcctcccaccctctccccaccaccgcaaccaaaactgcttctgtggatgcctactggcatgttttgaagttacctacacatttatttcagggtcaactagtcctgagcacctctggggaaaccttataccactctccttttcccccaggactccccagggagcgggagttctcagccctggcgcaggctggagccacctaggcagctttgaaaaccacccatgcccgtaagggatggaactgggatgctgaaaatgttccaaaaccagatgacagtaatggttgcacaacttgggacatttaaaaatcattcaatggtacacttaagatgggtgaattttatggtatgcaaattatacctcaataaacttgtttttaaaaaaaaaaatacccaggcctggatctatcactgaaccattaaatcagaatctctgatttggggcctgggctgagattcctgctctggtgtcaccgtggggacatctctttccactgtcaccatcactcattcaccctgggagaagaggagtgaccccccgccccccccgccgccccaactcattgatgggcatatccatttcctagagcagttataacaataaccatgaactgggtgactcagaacagcagtaattgactctctcatagttccggaggccagaagtccaaaatcaaggtgccagcagggccacactcctccaaaggctccagggagggtctttccagctgctggtggctgccagaagcatcactctgatctctgtctcctccttcacatgaacttcttccctgtatctctacgtccccactctctctgtctcttttttttttttttttttttttgtgagagagtcccgttctgtcacccaagctggagtgcaatggcgcaatcttggctcactgcaatctctgcctcctggattcaagtgattctcctgcctcagcctccctagtagctgggattacaggtgcacaccaccaagcccagctactttttatatttttaatagaggtgggatttcaccatgttggccaggctggtctcaaactcctgacctcaagtgatccacccatcttggtctcccaagtgttgggtttacaggcatgagcgaccatgcctggcccccactttctcttcttagaaggataccaatcattggattagggtccaccctaatctaagtattacaccctcatcttaactatctgcagctgcaaggtccccaattccacataaggtcacattctgagtttctggattggcatgaattggggcggggggacaccgttccacccagtacagtagaaatgctagctgagtcaactgcattaaagccggtcatcccattacctatattacatacacactttcctgggtagactaccttatttatttccagttaaatgcaatttttatcgtcaaaatttccaagacttctgttagtttcctaactggagtgtagtggtgcgatctcagctcactgcaacctctgactcccgggttcaagcaattctcgtgcctcagcttcccgagtacctgggaccacaggcatgtgccaccacacccagctaattttgtatttttagtagagatggggtttcatcatgttggccatgttggccaagctggtcttgaactcctgaccccagacaatctgcccacctcggcctcccaaagtgctgggattataggcgtgagccaccacgcccagtcctaactcattatttttttattgcagctttaggtgaaaagcatctttacctacatgcccctgcatatggacatccagtaccaaatattctctttttaaaaatgtacaggctgctgggtatggtggctcatgcctataatcccagtactttgggaggccaaggcagaaggactgcttgagcccaggagttcgagaccagcctgggcaacgtagtgagacctcatctctacaaaaaaatcaaaaaaatagccaggcgtggtggcatgcacctgtggtcccagaaactcaggaggctgacgtgagaggatcatctgagcccagaaggtcgaggctgcagtgagccatgattgcaccactacactccagcccgggcaacagagcaagaccttgccaaaaagaaaaaaaaagtacaggccagtaataaggtaaaattcacaacagagtctacctaccagagtggagtgggagggaatccgcagagtcagacctttgccagcggattcactctcatttagcagagggaagtctctgtttgtcctcttctctccaggttccctgcctcggctcctgtgtgagcttccaagggctggtctcaggggtgagaatcaaaatgtctaaccacaggccctgactcatcagcccagatgcctgctgtaaacaaccagagctttttccaggcaaatgttgacctagctggtctcacacagggcagcatcagcacttccaagaagttctcccaggggcattgtgcttggagacagtttctgtgtgagcctgtgaacagccagtggtgcttaaaatcatgggcctctggccagcctattcaacattaatcgtaagtgcttatgaaaggttggcgttagatgccagattctgttctacgctcttggtatataagctcattaataactcgcaacagtcctagaaggtggagagatgattgtcattgtccctatttggcaggtgagtttaaggaacacaggcccacagtaacacacagttggtgcgtggtagcactgggattgaagctgtgtggatttatctctaaaaactagggtccagtccctccattttaccacctcttctgtttgaaaacatcacatatgggatattcattccttcatttaacaaatatctgtcgagtgtctactccatgcaagacagtgttctgggcactgcagctacaacagtgaacaaatggccacggcccctgctctcctgcaggtagtgtgggtggggagtggggagggggacatagaccgcagtcacagacagaaaataaaaccagaatttcagatagtggtatgtcataggaagacgctaaaatggggagggaggatagagtgattgggaagcatttttaggtgaaacagacagggacaaactctcccaaggggtgacattatgctgaaacccaagtaatgagaaagagtttttggagcacaatctggggagagagatgccagggagaggccacagaaagtgcaaaggccctgaggcaggaaaaggcttgaggaacaaagtgaaagatacctttgtgtctctgtgagcaagggagtgattacggaattactgtcctttcctttggtgtgataataatagggaggtcacctgggaaaacaactgattcttaggagatgcctgcccaagtcctgaggggtaatgtgtcatcatgtctgcaaccacctctcaaatgtttctgcaacttataaagcacacatggcaaaatattagcaactgttgattctaggtggagagtataagtgtgtccactgtactattctttcaacttttccatgtgaaattgtcataataaaaatggaagcaagacagcagcgaaagatgttggagtgccaggcaggagcaggatcgcgtctccatctaagaggaggagattttaggctgaagagtggcgtgatctggtttcctttggcatcattgcctcaactgccctggatttcaaagtctggctttgcagaccatgaaggagtatctctctcaggagcacaagacagcatgtttccaattctgatttagtgaacactcattgtgtaccttccagccaggcgttgtgtgtgcgttttacctttatcaatctcacttaatccacatgacagccagcaatgtcctcgatattatcctcattcttaagatgaaactgaggcccgggaagatcagccaaggaggggccagacagtggaggcagagcctaggttcgttagaaacctcagccctgggggggccctaagtcatcattccacttttactaaatcaccatcaacattcatcataattgattaattaattatgatcaaagcttaaaggtgatttttctgaaatacgattgcaaaactagatgcactgttccagagagagccctaaagtgaattgcactaatggtcaaatggatcctgcttttccccctgagaaaactatcatccaacagagttccaagcactctcccttgtccacagagatctgcagctgtgctgcctggggccacattactcattttaatattcaattgcacatttgctgatgctgtctgtgtgcctggatttcatcacatcacaaaatatgtggaacccacatctttaatctttcttgcctgcttatccaaaggaaaaccactagtgtggtaagcaactagacaaattgtcctgttatctgcgttcttagaacagtatcttaactggaggcagccctactgtctttcactggtaagaattcagaataaacatcatcattctttgaaatcactcataagcagcccccaggagactgcaattatacccgtttataattctcctccctcccaaactaacccttgattcataaatgtgcacttttcggcgtcaggcgttagaataaattagactatacaattatgtataattaaaggggaaaatgggtaccgtgctgcaaagattagccgtgttttgctgaagtaaagcatgtctgtgtcagcgtgctggcccagggaggcagcatgaaatacaattaatgttcttcttacttaatgggggtttatggtactgtttttcattatcacagtatctcaagaaatataaacagtttttctctaacgcaattgcatttctactgacaacacagcttgggtctaaatgaaaattcagcagaattaaccacaggtttatattgttatggatgatcctggaatctgtattttaaaagccatgcaaaactgtgtgcactcaggagccgagaagtttgatctcaacctcctgagagtggttctgcagcctcttctgctcttgtagaagcaacttacagccaaacttgtgtgcattattaaagccacctgtgccccagtactacggctagcattcccaagcctcccgtctgcagccatgttccttcttctaacgtttctcctttacacgccaatttgtttgagacatgttaaaagcttgacttttacaaccctcataaaatcccatcgactccaacccaaatccagccagaagtgctcggacaatcagattgagtttcaaccacttgatggagataaagaaacacatagcaagaatgattttttttattgttatatatgagtcaagggaataaaacagcaactccggccttgcaagggagatagaaccggatggctgttctgcacaaaagggctgccaaagaatctgcagagggaagaaacgaggcatggaggcgtcaagagaaaggtccccctgaggttaaatcaacaatgctggggagaatggggcggcatgaggagcttgaaaagcttgattgtccagctaggatggtcaggatcataccaagagatgtcatgggggatgagggatgtgggaggagaaaagctgtctccgtgtgggtggaggcggcaggggctggagtatcaggaggccgtgggggtgcccaggattctgctgagccccaccgaggcccggctgagtgacttcccaggctgggggacatgtgagccctcggggcccctcatgtatcccaggcagacactgagctccaagctccgtaacggggcctgcggtccccaccggcctggaaggacctggaaaacaggctgaggccttgaacccagaggaccagggagtttgctgggaattatggggaagaaacacggccagaggagctttgcagaccctctgacctcatgggtgtctgagccagtaagtccagactaaaacgcatgacccatagcacctgcctacaatgaacacacacatacatgctcggacacacaggtacacatgcatgcacacacaagatctgtccccgtctacttaaggaaggataaggggccaacatagacgttaccatgtttggtaatgtccagcaacaatggaaacaacatatccaaaaagataagcaaatgccacgtgtccgccaggcccacagccccagaagaagggattgtaagcatcccctctctgactggggttacctgacgagcagagaaggatggagtgaaacattgtgggcaggatccttatgggtatgggagagccatgttcaggaactcgaggacctaagggcacagtgtggtaatgcagtggggttttttttagactttttttgccgtggaaatttccccacccctgaaatattctccagaacccaacataaaaagtaggagggaggcagatcccattcctgggcctccctccaccaccccaggccccagaagcaccaccaaggggccctgaggattcagtaagaaaattgcttctgcagtggggtacatgtccccaaaccagggacagcatcaaaagggttgaaatcccactggccaagtttttgactataggcaagaccctttatctctctgagcatcagtttgcttgaaagattgtcaggaggattacatgaaatgacccggtggaaacagccattgaccgcagaacctgccagagttgcactgtccagcatgggacccctgagccacatgtggctggtcccaattgagatgtgctgtaagtttagaatgtacaccagattacaaaacttagtaagaaaaaataatgtaaaaatatctcattaattttatattgattacatgttgaagagatcgattttggatatactaggttaagtaaactatattattaatattaaaattaatttcacctgcttttttcagacagggtctgactgtcacccaggctggagtacagtggaacaatcatggctcactgcagccttcacctcccaggctcaaagtgatcctcccacatgagcctcccgagtagctgggaccacaggcacatgccactatgcccagcctaatttttgtatttcttgtaaagatggagtttcaccatgttgcccatgctggtctggaactcctgaactcaagtgatccgcccacctcggccttccatactgctgggattacaggcgtgagccactgtgcccggccctcacctgtttctttttactttctaatgccactactagaaaattctaaatgatatatatgtccttctgcagagatgaggcggaaggagaggggtctccattatttttcggtctatgatggtgaagcctgacattctgtcccagggcaaagaaggtgggagctgttcagccttatcagtgatgccaaaggtagggccagcacctgacttggaaaagcaagtgcaaggtttttctgatttatttaggctctaacttgattggcgtggctaacagaggttatggggaggagcctagagctccaaacccagtcaggagatccgatttgaatttcagatttaaaaatgaatgattttttagtactaacttcctccccgtggatgtctatatttatttgttaagtctgacaactctaccatggaggatcatatcagagaaaggagatgctaggttgaaaagtaaaaacatcctaggatttaagagcatgagccgggagctaaggcttcttggcttcacaggatccaccacgaataactgtgtgatcttcggacagttactaaacctctcttggtttccatggtaaaacgggcatagtaacttactgtgtgagattgtcacaagatttaataagttactgctgtttacaagtgctttcccacagcggcgtctgtttccccttagctagcaactcggctgtgttttctgcagctgctggtgagttctctgcccgctctttgcccacccgcgtcaggccggtccccctccggcctcttctgtggcgcgagggacagcggaaaccacggtagacagcacccccttgagtccaattcctcccctttcggaggaagccggtttctcctttctatgctactcccgggccatttctggacaacagctgctattttcacttgagccgaagttaatttctcggggagttctcgggcgcgcacaggcagctcggtttgccctgcgattgagctgcgggtcgcggccggcgccggcctctccaatggcaaatgtgtgtggctggaggcgagcgcgaggctttcggcaaaggcagtcgagtgtttgcagaccggggcgagtcctgtgaaagcagataaaagaaaacatttattaacgtgtcattacgaggggagcgcccggccggggctgtcgcactccccgcggaacatttggctccctccagctccgagagaggagaagaagaaagcggaaaagaggcagattcacgtcgtttccagccaagtggacctgatcgatggccctcctgaatttatcacgatatttgatttattagcgatgccccctggtttgtgtgttacgcacacacacgtgcacacaaggctctggctcgcttccctccctcgtttccagctcctgggcgaatcccacatctgtttcaactctccgccgagggcgagcaggagcgagagtgtgtcgagtgagtgtgcgtctgtgtgtcccggcgagggtgcgcgctcggcgccgggagcgcggccagccgagtccggaggcatcgggaggtcgagagccgccgggaccccagctctgcgttcactgccccgtccggagctggacttcggggccggggccggggccgtgcgccggggacaggcagggccgggtcgcgggccgcgcgtcccccaggccggaggtaaaagcgctagcgcgcggagggctcgaggagggcaccgcggctgggccccccgcgccccgggccccagccgnccgcggctcccggcccgacgctccccgccccggagcgcgcccgcctcccctgcgtggaggccggcgggcaggcgagcggggggcggtagcgccgtgccaaggggctggctggggcagcgyggccggccgggctggggcgatttaagagcggtccgggcggggtgcggagccggactttggctggggcggcgcgcggggagggggccgggggcggtggcggcggcgytggggggcggggaggaggcaggaggaggagcagcagcgctcgccgggggatgcagcagcggcagcggcggcggcggcggcggcagcggcagcggcggcgcggagtcccctgcgcccagcggcccggccgggctgcggcagaggcggcggcggcgccccgctccgggtgaggttgccggggccgtgcgcgctggtgagtggggcgtggggggcasgtgggtggctgggggacgcggggctcgggcgggggctcgcggcggccggagccttccccggcgtgagcccggccgcgagcgccgcccaggtgagccggggctggtccggaccgcccggctccagccccagcgctgcttgcggaggtgggtccgggcgggcgggagggaggctccggcgccggccgtccgcagagggatgacctgtttgaccccgctggctggcgggcgggcgaggacttcccgccgcgcccctgacccgcggacacggcacaccgagcacaggcggccccgggtaggggagcgcgcctgggccggccatccgcaggggcatggccttgttgacccttagggtttagacccaagggaccggtagatgccagcccacgtggggcttgtccgggcaggactcggggaagcagtgggccggatcttcagagtggttggaaactcgcagacaccgaaaggacaaacaggatcgaaaaggcagacttcctcccaggccagggcagaacgagtttccatcgcctggcggagggatgctcccctccccggctcctcggggtttcagaagtcyagcggtgrattctaggagtgcacttttccaaacattccttatagtagttcgttcattcgttctacaagcatttctggagcaccccctcgtgccgggcaccgcgttctgttccagggaaacgcggctgaacaggatctggctcctgcgcgccagaagctgccggttcactgggagggcagcagggtagagagatgccgtctcggggtggaagatggaaagggaagcctgcaatcctagtttgcacactggcctcggtccgcaactcccccacctgcacgcagtaggcccagcacacagtaggaagagcaagccagacctgcctgtgacgaccctctcctcctcctcctcccccttgaaagctttgattcattccctgcccccctttctggaaagtcttcctgcagcttgttttaatcactttttgagttaaaagtcaatatttaattaaccaagtaattacattcagcttacgtttcaatctgggtatttgctcatctgtgcgtgttgggacacccgccctctcgcccctccatctgtcccctgcctgtttcccaccgggtccacccccacttttggggcagagaaggggaggctgcgctggagcaggttctcagggggagacagggagcaggagagacgggctttctctggaggacacccccggatctgcgcgctctccaaatttcagcttgtagtgaatagtgaaggtgatttcttgacagcctctgcctcccattacagaaccaccagagggttctaattaaattagagccaatcgttaagtataggaacggggtagggaggacagaacgaagggggccccttccctgtaagagatgttctccccagcttcgtctctcccacatcatagagaagagaaaactcatccagacagcctgtcggatgtgtaatttagcgttctaataagcagcttgaaaggcgaaggtggtgggcttggcagatggcatgttggacctttgtacatgaaggcctcttccttccccagctaaatttatatacataaaggccgtgatgttggcatcactgctgcagctgagggtcaatgtgggtttggggtttgggctttgtgtgtacttcttgggttttttatttgaatttatggctttttctgaaaccctaataacatgttaaattttcaaacttgagagtagagtgatgagttgactgtaaaagtctggtcttggaggaggacagcatagcagtgtgtgtgcatgcacgtgcatgtcccccagttcagctgctgtccaaagaacccagttgatatgcagtttcacacctgatttggacctgatttgggagataacatttccttctcactttttctggcactggttagtttatctgcttggacctgcctcaagagggcagctgggttaaccaggcagaatatcacccaactctgtcaagctttggccattatctgaccttagactttagtcctgcagaaggagtccagaagccctgtcctacagaaaaatatcagcatttctgaccagcttgtagttaaaagaaaaggtttagtccagacttaagataattggtaacacttaagtagttttgtatgggcctgatctgaggcattgatctaagcccttataccttactcattaaatccacacaaataccctgttaagtaagtactgccattgttgccatattaaagatgaggaaacaggcacagagaggattgtgacttgcctacagctggtcacaggtagagctgggattcaagaggccctcaagctccggggtccacttggaaccactggactctcctccatgaccttggcctttgtcccagatgtagaagaaacacatatgcaggggaagaaaacaccttcagacagtcaaactttgcaaagtaaaaggcccttaactttccataaacccccactgttccgacagagagtccgggtttgtatttgaggttttttgccccaaggaaaacatgtgtctgcctggtgctttttcttctgcttatgagcagacacactgtcccctcccccagtcaaaatgcaaagggaaacatcaaatgcagctgatggaaaagccaggtgaaccatggtgaagatttcagcccactcagagcacagtggccagagagcaaaagctctcctagaggtgagaccttcctgtggttggtgatggagtctcgatggcctggccctgggggtggtgccagggtgctctgtgtcaggcctgggcggatgtggaagatgggggcctctctcaatgctgatctgcaggtgagggggccctccctgaaacctgctttctctgggcctccttggaatgggccttggtggagatctacagacagccctggcccagccggattgaaggcactgtctaattgggagggcattaagatcgttataattaattggcatcccgataaatggcatggttgcctaattggggtggttgctagggaacgaggcctcacttggagcctaaaggggaagaagcgctgggctggccacagttgggtgtcagggtacagatccagcagtgaatggaccggaagggagagcagtccatccgtatctgctggtgtttactgagcagctgctgtgtgcaagttgcaaatggagtatcagttaggggtacttgcctagaagaactgtaaagtaatcaggttcctttctcttgcaagcaacggaaaaagagaagaaaaaaactcaagccagcttaaggagaaaagaagtggacttactggttttcataaccaaaagtcttaaggtgactaactctagcttcagacacagctggacccacagctcagattttgtaatgagaatccattcctatccaccgctcctctgccttccatgaggctgatgtctctccagctctggggcgggcagtccctggcagctgtgggcaccgtggctaggagagccagactgcctggctccctgcccagcagtgggatctggggcatgctacttaacctttctgtgccttgatgttcacatccaacaaatgatgatgatcatagcacctgtctcctgcttgtggtaagcatgaaatgagatgatcaatgtcaagtgcttagcagggcgtctgacccaggtgagccttcagtaggcattgactgttaccataacttaggtgtcaggacagatgtcatggagcagaggggtctcatcccctctggtttaagcccaaaaggaaagaacaagcctctgatctggcaatgcacacctgagccccatggttccctctgattggactgttttttgtccaaaccagtcactggctaaggaaatgagttgccaacaattggcttaagccaggctcacaggcctctccctggagctggatggaggctgactgctgagaccccaaagcctggaataaaacagcacggggagtccccagtgaaagggaagcccggttgctggagaggcagatggccagtgcctgcgatgatgggccactaatgtgagcaatgctggccagatggacccatcttcattttggccaaggtggagactggggaaacacgctgcctgggcaatgcctctcccttccaccagggccaggaggcatcaaaggcctgacttttctgccttactgtctgaaggatggggcctggccttgatcctgtgctttcggggggccaggggcagtgtttgtctaacctcccaccatgagaatcatctggctgtatttgtttaaaaaggcaaagaccagatcctgttgaatcaaacttctagggagggtcctggatgctggggggcatgaccaatatgtcatgtgtatattctatatcagcaggagggtttggcgaagagagctctggagcgtgggcctctttgtcttcctgcctaatgcaggggctgtcagaaggcggggaaaatgctctaggcctggcgtgctggctcatgcctataatcccagcactttgagaggccgaggtgggaggatcccttgaggtcaggagtttgagaccagcctggccaacatggcaaaaccctctctctactaaaaatacaaaaattagccaggtgtgatggtgcttgcctgtaattccagctacacaggaggctgaggcaccagaatcgcttgaacccaggagtcggaggttgcagtgagccgagatcgcactactgcactccagcctgggcaacaaagtgagactcagtctcaaaaaaaaatttaaaagaaaaatgactgcatgatgtgatggggtgggaggcaactttaggcaggctgtcagggaggcctctgtgaggatgtgacctttgaactgtgacctagattttaggaaggagtccgccttggaaagatctgggggaagagcatgccaggtagaaggaacagctagtgcaaaggcccagaggcggtgggaggggcctgtccaagacacctgccccaaacacaaatagaagtcaagtggggtaggccaggcgtggtggctcacgcctgaaatctcagcactttgggaggctgaggcagttagatcactggaggtcaggagttcaagaccagcctgaccaacacggtgaaacctcatctctgctaaaaatacaaacattagccaggtgtggtggcacgtgcctgtagtcccagctatttgggaggctgagacaggagaatcacttgaacccgggaggcaggggttgctgtgagccgggatcacacttctgcattccagcctgggcaacagagtcagactctgtctcaaaaaaaaaaaaaaaaaaagtcaactagggtagagggtcaggagtaagtgggggagggcacgtcagagatgagaaatacaggccatgctaagaaattttagactttattttaaataaaatggataactgtctggacgcggtggcttatgcctgtaatcgcaacactttgggaggccaaggcgggtggatcacctgaggtcaggagttcaagactagcctggccaacatggtgaaaccccatctctactaaaaatacaaaaattagccaggcacggtggcgcacacctgtaatcccagttactcgggaggctgcagcaggagaatcgtttgaacccaggaggtggaggttgcagtgagctgagattgtgccattgcactctagcctgagtgacagagcaagactccatctcaaaaataaattaaaaaataaaatggagaaccattggagggttttaagtcagagaatgatatgatttgtgtttcaagaagatcctgctggctcctgtgagaggcgtgctgtgcagatggaagtggtatcaccgggactgttaggcaacagagagggcccgagagtggcttggaccgtggtggtatcaatggagatggagtgaaatggggattggagatgtattttggaggtagggcccacaggacttcctagtggattggattacagagtgagggaaagggctttgattctcaaccgagggtgattttgacacccagaaaacattttaacactatccggagacagtataggttgtcccaactggggaagggttgctactggcatctagagggtagaggccagggatgctgcttaacctgcaatgtacgggatgaccccacagtgaaaaatgattcagcccaaatattcatgatgtatcctgccaaggagtcaaaggtgactaggcagcctggtgcgtggtgattgctaaatagggaagataggagagaaggttttggggaggaggagtgatctggaattccgacgtggaaatgttgggtttgagatgaaccccacctggatgtctgaaagctcagtgggtggtgaacgtggatgtctgcagccggtcggggctggcaacctaagtttgggagttatcggcatattgatgttattttaagctgtgggactggacacaattatccagagagaatgtgttttgttttctagtgtggttttctccccccagcctccccctagtgcctgtcatgaatctatttgatgaatatttttagcatatcccacatgctcacctctctgacatttccaagaagttcctgaaggctcgggctgagcctccccttcttcatcgcctggtttctcagtgattaacagacagagctaaatattcattgctctgccacagatgcccttgggaaattgcttaaggtcatgtgggatctcgggccttgtaggcagcacgatgccttctgggtggaacagctgttggcatggccttcagagcttctcctccagcccaggccagggcttcttggaattctctgtaaccagaatgttttgaattccccacgttctcttaatgtgattccaaagcacacgttgcccagtggccctggcctctgccatggagcgtcatcttacagaaggcctggcccactgctctgcacacctgggcccagcttgaatcttagataaattctatcccaaactcagagttgttatggccaggtcttgtgtgtgtaagttggtggacagggccatccccagggaccacaaatagtaccaaagatgtgtttggccatgtggaagccagatgtgttaggggaagaatgtggccaatagcttttcttattggctcatggtcaggaccccagcgggtgacttgacccaccccagtagccagagaagaggagcttttttgtttttgagacagggtcttgcactgtcatccaggctggagtgcagtggcacagtctcagttcactaccacctcaacctcccaagctcaagtgattctcccacctcagcctcccaagtaggtgggactataggcacaggccaccatacccagctaattttttttttttttttttggtagagatgagatcttgctatgttgcccaagctggtctcaaactcctgggctcaagtgaccctccaaaagtgctgggattacaggcgtgagccaccctgcctggcctggaactttttgaaaagagattgaaaaaactgttagctcacagaagccttggagatgttcctgcttggtgaaaatcagaccatctgaaagccacatttctggtctgctctcgagacagatactatccatagacttctgattgcaggccacttatctggatatttcagagaccaggaaagcctactataattcttagtagcttagagtcctgatcattttaatgtgaattgaaatggtttcattatgaggaatcacatttctgactgacagtggcttatgcaatagaaacatttaattctcacataacaccaagtccaaagcaggggagtccaggcgctggtttttcagtacaacagtgtcatccaaggtcccaggatctttcaagcctcttcttctgtcctcatcatgtctttggccttgttgcctcatagtctcaatatggctgccacagctccagacgtcgcatcaccctacaaagtgggactataggacaggactccttgctgtctctcttttaatcagagagtaaaatccttgccagaacactcccaccctagcagactttgctttctgtttcattggtccggagttgggttttgcactcacctctaaatcaaacactgggaaaggacctggctccttcctatgcttcggatctcagctgaaatgtcacctccctagaatgctggaaggacaacctgttttatgttttataacacttatcactctctggaattagcctggtttgcttatttgtcctttgtcttctctctcctcactaaaaagcaagctctgtgcttgtagggacattgtctgtcttgttcatcgctgtatccccagcactgagaaccagggtggcactctttggatactcagtaaatttttttttgaatgaaggaagcaagaaaagaaagaggcttggagagctacaggcacatctggctagcatgtttgctcgaaggtgactgctcagggcaaggatgtcaaaacctgttagtcatttgcaaaaagctaagcaggtggctgggaggattggtttcatacacactcacttgctccccagtgccagagctggggttttgtgctagcattgcttgcagaggaaggatcgtcccctttatgccacggcagggacctcacggccttgcagaagggctggtggaaccctccacttctgatgactctggggccaagctagtcttccaggtcagtggtgtgacattctaatgagggctcttgggttaaatatttctgcatgtgcccttgaaaagacaactcccttccctaaattgtcccttcctgaaagaacagcggtcacagcccaggagagcagcctctttaacctccactccccaacctaccctcctgaaagctcacatttaccgagcactttgtacaggctagtggtggtttaagtgcgcgctcctgtgaatgtggaataactcagcgatgtggggatcttccaaccccgttttacaaaggaggaaagagacacaacgaagtctctccttgctctgccatgctggtagaataggacatcacaggccacctaaccaggggctctgttcagctcgcagaaatgttttgtttgaaccttctaaaaagctgtcagatttgtaacaactacgagatttcacattttaaaaatctggattttcagcttctcctgaaaaatggggagatgtggtccccaccatcccctatagcctgacattgtgaaccaattcatttggcttttcattgcactttcccttctgtttttctcattgtggagcaatatttctctgttccatctctaccaaaagtggccagatgagagctggagaggaagtggggtgtggagttttcttatgcgtccacttcacccgtttacattatctgcctggcccacgtaggcatttgagtttgtctcccgttgtgacactttgtacccaatggctacacttccagggacattgcaagtgtccctggacacttacattgtgcattgcaagtgtgtagtaataataatgtctaatatctattgattactttttgcccagcatttcatcatcacagcaagcctttgaagcagggactaatatcatcttcactttatcagtaaggaaactgaggcactgtgtgtgatgccctcactagaacaggaggtcctgaagcttgttcatctttgtaccatctgtgctaggcttactggctgtttgaatgaatgactaaaggaatgaatgaatgatgttctcctccaagtgttcattagccgaagaggctgaaagtcttaacctcatagtcatttgtgacatttctgttgggggaatgggctctgatcagtgtcactgaggattcttgggttgtgtttctgctgtataacaaaccactccaaactcagtggtttaaggtaacaacattttattttggacgattctgtggtttgaccaggtggttcttcagcttcatgtgatatcagctggcaggtctaaaacaaccccattcaaatggctggcagctcttgctggtcaccagatgggagctcagttattctccatgtgggctctgccctatggctacttgggcttcctcgcagtatggcaggttcagggtagcctgacttctaagagtgcaaaaatgaaagctgccacggtctcttaaggcttaaccgcaaaaccggcacagcatcacttctgccaccttctcttggtcaaaacaggtcccaaagccagcccggtttcatgaggtggggcccacacaagggtttgaataccaggcagtgtggctttttggagtccaccaaagtacccattcatcacagactgcaagtagcagagcccaacacttactacctcaagctggaacaggatttactggggggctcaggaaaggacaggtcaggaactgaggaaattctggggaccttggcgcaggagttactagcagcctcctgaaggagagtttccatcccaatgcgacaaatgcacccctgctttttctttctgcccttgacactttatttgacagttggggacatggtaagaaagtctgattgaccttggtcacatgatcaccccttggcagagaggatgggggcatcttggcagaggggagggagtcctcaaaaggaagctggggtgctgtcaaaagaaggggaccagatggacaaaaattgttagaaatctctgcaccgcccctgcataggtgactccacccctggcagagcaatgaacattttaaaacgagtgaatggactttgaaagtccagtataagtagaatgcccaaacctgtgtggcagcttctccagctccagggccccatagctcaggtgctgctgggggtctggaagcttctctccactttacggggcaaagtcaactcctagaacccctgccatgcctcaatatccccctccagaagataggggcagtttgcttctggctcctgaaaggagagcatgcgcggtaatgagggacctgggctcaatgcctgcactccctcctcccagaccccgcctcaccagtgacactgccttccaccccaacacctggtgacacccagtgagtccccgcagcaggggaggctgctagtaggaaaaactgatccagactaatctcagctcgcagagcctctgacccgggctttcctcccacttgccggtctatttccggctgctaattagattgcacagcaagccacattgggaagccgacctgtcgttccaaaggcactccactcgcatctccaaatgtagcaggtgatttggtaaaagttgattctgactccttcccccagcttctaaaataattgtaagtgtcgggctgtttccaaggtgaactaatgaacagctcatctgctaatagcaggggcaagctggctgaggacggcacgctcgcctgtggattgggtgaaaaggaaagaagtaattggattattaataccaagccgtcaaaataccttttattccttttatattcttctggaaggaaacgacaatctctggaaacataaatacatgttctgtgggggtaagcagggctaagaaaatgtggggctgaaaaggaggagggggttaaaaaggtggaattgtcagtccccactgtggcagtctacactgagaaccagcccacagttaggcgtgaataatgactctgttcaagtcggactttattgcttttggccaaaggccttttgcagaaataactttgtaactccctgccagggaagcttttgtccacagctgagacaaaggaacaaagaacagaggtgggaatttctgtatctgatttctacttcctctaaacagccagaaaggacagcgggtgtggcctgcccagaaggcatgggctggggcaaaggggtgtccagcctcctgtgggccacactgccgtgctcggctgcaccatgttggtttcattgtgcacattcccaccccagggcctttgcacttacttcctccgttcatagaaagcattttgcccacaactggcttctcgcccgcctctgctctcagctcagatgccatttccttatgccacctcctcatgccagagaggcctttcccaatttactgtccatcctatcacctgacagcttcctccaaagctcttaagacaatcttcattcattcattttctcctccaccaaggtatcacagctccatgaggacagaggcctggcctgccttgtggccactgctgtttcttagcatgtggcacatagtaggtgctcaggaaagattggatagcttggaagagtcgcacatagctcccaggccaagctccagcggggctttatggagcccgctcagtgcttaaaataggttgaaagtttttactttggaaatggtgtttccggtgtagtccaggcgccaccccatctctatcctaaatctaggccactttactcactcaggtctcctgcccgacccttggatgcatttgcatatttgyccctgctttagacaaaggccactgcaaacatatctctctccaaagtcaccagacaacatccagacttcttgcattgccaagtcttgtgccagaccggtggcctccaccaaccaggtcccattgactggatcaaggtgtagtcttcatcttagccgtccacgcacagggcgtaagtggcgttgatctcatcataagcaggtcatggcaggaggagggtcgggcaggagacctgagtgagtgaagtggcctagattcaggataagagacggggtagggcctggactacattggaaatgccatttccaacgtaaaaacctttaacttttcctttttccccttttccttttctgctctcctccaagcctctgggtcatcaaggagggaatcgcgtgaactcctcctttatggtcttcaaggagacctactcccaatgtaaggggaagcgcagaggccttggcaagcaagaatgtaaccacaatgtcattgcctttatactgttgccatctaagtatggcaggggttctcacctaggggcagttttgccccctagggggacatttggcagtgtctggagatatttttgattgtcacaactggggtaggtgctacttgcatctcatggacagaggcctgtgaacaccctgtgatacacagcacagtcccccatcgaagaatgatcctgcccacgcggcagtaatgccaaggttgagagacccaggtttatggcaatgggtgctggttcctccaagatagacttttctttctaaataaatttattgaaataagaaagggaatgaatgaatgaatttaggcccagatttgggtattctacttataccagacttttaaaaattcatttatttattctgagacgctggcatatgggatggagcacagaggttaacgatcagccctgtcatccctttcggagcagatcaggctgtaccatttgcctcaaatcaggagcccctgccctggaagctgccatcttgccagaaacttcctggggagctgcctgtaaaaaactctagcagcagttgattctggcccaggtggaaaagctgtgttatcccaggcggagttccggcaggttgggagatgtttccaggtctcctgcccagccaggcatgatgagcatccttccaagcttggccccggagccctggcccagcacccccatttgaagcctgcagagcctcatcatcactgcccccgcccccgccccatcctgccactgacaagccaatacctgcctgatgagaggggctcccagggacagcagccttccctcctggactccagggcaacctccatgttgttgggcggctttgagcacagggctcaagggcagaggctgagttggaaaatttcttgcctctgcagaagggaagagctgggggaggttggggcctttttccccaaacgaggtcttattcttctgtggggttttctgggtttgttaggtggcttcctttctacttaaaaataagctgggagtggttaaaaaatgggaagaaatcaatgtttctggcgtacatagaactgagcagatgtgttatctagaataaggaggagaggttgttgtgactctagctcctggtacgagcccttcagttcaccctcctgccctgctcagaaccccctggacctgacatcgtggctttaacacccttgggtcatgtgagaaggaagagtgcccacccaggactttccgaggctcacagattctttgaaatggacgtgagcacaaacgcccagccccgacagccagggatcagatcgggtttcacttcctaggagggaggatgtactgcaggggaggcccacgtggctgccccaggcctggccagcctctgtgacccagcaggactgactgttttacgggatggccacacggtaccctgcaggctcatccatggtgggaccttgatgctcctttgttgagatgtgggtctgtgtcccctccccttgaatctggccagacgtgcgtagccctggtggaaggaacaccatgggacagcagaaaagatgagccagctccccctggatcactgggaccctcgctgttgtgtaagaaatcagaccccactgcaaggccgccatgctgtgaggaagcccaagccacactgaggccacatggaggtgcccactccgcagcccctcccaagctcccaaccgactgccagcaacaactgccagacaagccaaggccctgctgagccttctcagcagtggcctcagacgttacaaagcagagaccagcccttcctgccatgtcctgcgcaagttcctgatcaggagcctctgagaataaaagaaagattttaattcaccactaagttttgcggtaaattgttacacagtattagtaactggagcattcagccaattccagtcttcccaccgtgcagttattcattcattcactgaacaatattcagaaaccgtccacctcttgccccttctttgctcccacctagtcatctcagtggcctccctgtgcctaccctcatgccctgcagtctgttcccctcacatagtcagaaggattctgttaaaacttacatcagggctgggcatggtggctcatgcttgtaatcccagctctttgggaggctgaggtgagaggattgtttgagtccaggagttcaacaccagcctgggcaacatagcaagacctcatctctaccaaaaatttaaaaagtaatcgggcatggttgtcctcacctgcagtcccagctgcttgggaggctgaggtgggaggattgcctgagcctgggaaatggaggttgcagtgagctatgttcgtgccgctgcactccagcctgggcgacagagcaggactctgtctcaaaaaaaaaaaaaaaaaaaaaaaaactacaccagatcacatcacccgcaagctagaaccccccagcccccttcactcagctccgtgccgccatgcgtgccccctttccggccctccctcaggcatcttcctacctcaggacagttgcgctttctgttccctgtgcctaggatgctcttcccctaaatatccacaaggcatgttccctcccctcctgcagggatccacccaactgtcatctctcaggccttcgctacccaacctatttaaagttacaccccctcactccctagcactccaacctccctccttaggacttgatctccttgggacacgttgcctcatatgttgtgtaatttattttggtgtctgatccatgaaggattgtttttcctgattcccagcactgaagaatagggccgggaacatagtaggtgctcaggaaatctcggctgcctatctggaagaattagcacctcggctctgccaggagctggggccgtggcgtcaggcaaccaagagacagcccctgcccatgcgagcttctggtggagggatgcccctctacaaaataaaaacccaggccaggtgcagcggttcacgcctgtaatcccagcacattgggaggccaaggtgggcagatcacttgaggtcaggagtttgagaccagcctggccaacatggtgaaaccctgtctctactaaaaaaaaaaaaaaaaaatacaaaaattaggcaggtgtggccgggcgcggtggctcacgcctgtagtcccagcactttgggaagccgaggcgggtggatcacaaggtcaggaaattgagaccattctggctaacacagtgaaagcccgtctctactaaaaatacaaaaaaattagcgggcgtggtggtgggcacctgtagttccagctactcaggaggcggaggcaggagaatcacttgaacccaggaggtggaggtatgcagtgagctgagatcacgctactgcactccagcctgggcgacagagtgaaactccgtctcaaaaaaaaatgaggcaggcatggtggcgggtgcctgtaatcccagctactcaggaggctgaggcaggagaatcacttgaacctgggaggtggaggttgcagtgagccaaggtcatgccactgtactccagcctggatgtcagaggagactccatctcaaaaaaaaaaaaaaaaacacgcacacaaacacaaactcaggccagagagtaaatagaggaatcacaagttatgataagtgctctgaagagagcagtgctgggactgggggtgggggtgaccgagcagggcctgcttcagggacagagggccagggaaggcccaagtcacagccagggtggccgagtcaggtccagaatttgtgattcccacacccacgttccttccgcttttccacactaccttctcttatcagttgtcaaagaaggatgggcgagttggccctcagtaaggcggagagttgggcacaggccaaggaggcctagcgtgggctggtaggccgtgccctgaggcctctgttcacacaggcacgaggtggccaggaagccacgggagtcagccctctgcctccagcccgccccccaatttgggttcatttggttgcaagtgagagagcaactaggaatgacctaattgaaaaaagggaatttcacttctgatcttgaagagtcaaaagtatggggaaactgacctacaaagaaaacagaaactagttaaagaggaatttattgggcctgaaacaaagaacccaacccaaatcttcctctttcaggctgggctggatcccaggtgtccagtgctgttaagtcccaagtatggtgcatttcacagcactgctgtgttcggtgtgttggcttcattcccgaccccactcaagacaaagtggcgtcgctgtcttccctggtcctcacattggaaccacatggagtgagttagccagttgtaaagactggatgcctcttcctgaccagtcaggccaaagggcctggattactctggcccgtcactgaggcaaggggtggggaggctctgattggcccaggtctaggatcccacgatctagcattgtagctccagaactggagcctaatttgaactttgtggaccaagggtggggagaaaaggatcccccaatattttttttttttttttgagacagagtcttgctctgtckcctaggctggagtgcagtggcgtgatctcagctcaattctcctgccttggcctcccgagtaactgagattacaggcacatgtcaccacacctggctaatttttgttgtttttgagacacggtcttgctctgtcacccaggctggagtgcagtagcgcaatctcggctcactgcaagctctgcctcctgggttcacgccattctcctgccycagccttccaagtagctaggactacaggcatgtgccaccacacccagctaattttttatttttagtagagatggggtttcaccgcattaaccaggatggtctcgatctgacctcatgatccacctgccgcagcctcccaaagtgctgggataacaggcgtgagccactgtgcccagcctaatttttgtagttttagtagagatggggtttcaccatgttggctaagctgatctcaaactctggacctcaaatgatccacctgccttggcctcccaaagtgctgggattacaggtgtaagccgccacacccggcctcagactcccaagaaaattgggagctgttatagaaaggagataatcctgggtggcccaaacctagcagagaacacaagccagcatttattgggcacttgctgcatacagatctgttgaaagtctccgtgcatgttaaaccatccactctgtaggcaagtgcttgtaggtgtcctcactttccagatgaagtcactgagaagacaagaggttcagacacttgcccaacctctagtaagtgacggagctgagatccaaacccaggcaggctagctctagatcctaccctcctcctactcagcgtgttccctgtggcattttcccccaagtaagtatcaggctgtttgcttacctctgtccgctgtttgtcagctctctgagaatcgagagttttgtctgttctttttttttttttctactgatcatgaaacagtacaaagcaagtggcagatgctcaggtatttgagggtgtgaattatatggcctgtcaaacatctacccacttgacatacaaaacattttggtgctcagcttcctaagacttgaatacattgtttctaaatttcctttgtgctctaactttaatccatggccactctgttctcacagcttgccggtggtttgccattatttccagtcctcttttctgatcattctcacatgtagctggaatctttcaactccagcttttcctatgttgacttagagtatcacttccaggagggcagggagctttcttttcactgctttatccacagtgccaagaactgtgcctggcacacacgagccttcaggaatgtcttgttacatcaatagttaggcaggtaactgggttcctaagccctgcatttttgccctacaatctttatgccctaatttcctttccagatcctgagcctttgtcttgaaacctgatctttccctcctccctctgaatgacccttctattgtctcctgccctgttcttgagagccggcttggttctctgcctccatttggaattccaagaacaggcaaggagagccacaagatggcctgggctaggtaggggagacagggagaagctgtggcccataggttacaggagcttctgtcctttctttgacggccccaaagaggaggagagaaggctggagaaagcctgtagccaggaagaaagggagacacaggggagtgtaaagtttaacagatgtgcgtgtgtcatcccctgtctagacagcttctgggcttgtgaggtttgggaccacactttcccatccctccaggggcctctctctgtttcctctgcctgctctttgcccaaactgtttctcctgcctgaagcatcctgtcctccaccctcctcttcactggccatccaaatcctttggattcttcagaactttgctcctgttaggctgctcagtttatgctaagtactcctccaggaagccctccctgactgctcccaggccagcagtttcccctttcctcttgctgtttatacaacacacttaacctcagtcccttgtatcacttgttgctttccaagtcagcataagtgtcaaaagagtaggctctggggtcagaatgtctgtgtgcaaatagccatgctggcttgcttgttttgtctgtcacttggaggtggcacatccaagtgaacctcccaggggacagggaagagtggattactgttgtaatcgggcaggattctcctatcactgaacactgcctcacatatagcaggcccttaataaatatttgtaaagtaaatgaaggaagagagaaatgatcaggctccctggaccacctgaggaggccctcaggtctgttgctgggctctggccccagcccgtgggacatatctgcacacccacaatttcctttcttccctcctctcatgagtgtttcccgtctgaccaatgccgccttctgcctctggccccttcttcctctcccaccacctcaactgcctaattattaccaaacttctctctcctgttttttttgttttgttttgttttgtttttttttaaggcagtgtcgctctgtcacccaggctggagtacagtggctcgatctcggctcactgcaggctccacctctgagttcacgctattctcctgcctcagcctcccaagtagctgggactacaggcgcccgccaccacgcccagctaatttttttgtattttttttagtagagacggggtttcaccgtgttacccaggatggtctcgatctcctgacctcgtgatccgcccgccttggcctcccaaagtgctgggattacagacgtgagctgccgcgcccagccctctctcctcctcttgttggatttggaggtggagagaagatgggaagggaggaccaaagggacagtattcagcacccatgctgcacgacactgggcaggttctggaacctgtccgtgccttatcttccttgtctgtaaatggagcatcccaactcacaaggtggttgtaagggtggcgtgaggtcacacactaaaagtgcttagaattgtgcagggcccctgatgttagctatcattcattattgttcttctagggtgtttcctgtgttggtctgggtgctccctgttgcaaatgacagccctaattcggactctcttaagcagcaaagggcacttttttgagtctgtacctggctacaagatgcaacttggtccaccccattgtcaccagcatcctctctctcgggctccatccaatgggcggccaccatcagcaccatattcatgcctcctggcacccagcacagtctcctccagcctccaggactccctctcgcttattggccagacttgggtcacatgtctgccccaggaccaatcgctgaagctagagctggaattgctgattggctccacctggctcacatgcgctgccctgcagtcaaaccatatataagggggggtgggaaataagagcacttgtggcctcaaagcactaacaggggctgttaccaggagacaggagataattctttgttaagccagtaaatattttgaatgcctgctatgccgcaagcattgttttaattgttgaggatatagatctgaacaaaaatgacaaaaacctgtaccttcagggggctgatattctgctggaggacatccgcaaagaaataaaggagctagctgtgagaggtggtaagtgctactggggagggcagagatttcggttttaacctgccaaggtgaaatttgagcaaagacctgaggagggggaagaagggatggtgaagataacctgaatgaaggctccaggcagagggagcagcaagttcaagggccctggggtgggctgtgctagcatgtgcaaggaacagtacagagaccgtgtggctggaaccaggtgtgcaagggagagaggggaaggcaataaggtcggagaggtgatggagcaggttgggtgggttcttgtagcccctttggagggtttttgcgttttactctgcgtgggatggaagttattgaaggccgttcagtggaggaaggcaggccctcygcttttgttttaacaggatctgtctggctgcttgatggaagggacgaggtagaagcagggaaaccagttaggaggctgttggaatccaggcaggattctcctatcactgaacactgtgcctcataggaggtccttcatacgtatttgtaaagtgaaagaaggaagagagagaaatgatcaggttctctggaccacctggggaggccgctaggtctgttgcggggctctggccccagcccgtgggacgtatctgcacacccacagtttgctttcttcccgcctttcatggacatttaccatctgaccagtgcctccttctgcctctggccccttcttcctctcccaccacctcagctgcctgattgttcccaaacttctctctcctcctcttgttggatttggagatcctcagaggaaaacagcccatctgggtctttctaaacaggtctggatgaggtcccaggtgtttgttcaccgctgtggtttgtggcattgggaaggtgagggcatcagtcactcagacccgttcctcttggcagatcggcagagaaattgagaactaaaaatgatgtttctaaatgctcaggacgttagctgtttccagagatgtctcctgggctggcgagcctttgccaaggtcctggagaagactcaggatggagaggaggagccagagagacctggaaaggaactggtgggaaggagaggtgttgtccacagcagggatggagtggcaggcggctggtgctgcgtgagttcactgggtgctctctcggttcagccactttgaatattttaccaagaaaaaggaaaaaaaacaaggcagaatcccttgtgtcatctttaattgatttcttcagcatccggagagaaactggcatgaggccacgagaagtctgagccaggggaattcatcagaaatcgacccactgatgacttgatctgatgaaataattagctcctgttattctctggcttctggtgccggagctttgacttccatccagaggagagcgggtgatagccgcccaggagtggggggtgctctgaaaccaacatgggagccaggaacgaagtccagctgactgtgccccgggctccatctttacccagcccagggctcccaatgaagactgcccttcccagcccccctgtaccctggcatcacaggcccagggccaaaaaggccctcagagggcacctggccacctggcaaatgaggaaactgaggctgggagactcttaggaacttgttcaaagatctgcttctagggggtcctggttgagctgcccaaatcgggccagactaggtttgaaccccttctctgccacttacccatatgatcgggggaaagtgattttaactctctgtgcctcagcttcttcatccataaaatgggtgaaatattgatgggtgggtgtgcatattaattgggttgacacctgcaaacagctcagagcagagactggagtgtgctgcaagctttcagaaaggttttcctgtgattggtttctggtttcagagagttgctatttgtagggcaccccatcggaattctcccaatattagcactccacgtctgtctctctgaaggaacgtgaatgtgcatcttagaacgctggctgctgcaatcgtagtttcaagtgcaaagcatcccgtagtgtttcccgatggagggacatgggccactgataatgtattagtctgttttcacgctgctgataaagacatacccgagactgggtaatttaaaagaaaaagatttaatggactcattgttccatgtggctggggaggccttacaatcatggtggaaggtgaaaggcacgtcttatgtgatggcagacaaaagaagatgagaaccaagcaaaaggggaaaccctttataaaaccgtcagatctcatgagacttattcactaccatgagaacagtatgggggaaccacccccatgattcaattatctcccaccaggtccctcccacaacacgtgggaattatgggcgctacaagtcaagatgagatttgggtgaggacacagccaaaccatatcagatacacaacatagtttgaggattactctgatttggggtggttcagggactgattcgatggctagagtttgtctccttttcagctgtctggcagcctccagttacctccagcagaaagtctcagatggtgctaatgtgctttgactcctttcaacacctgctaatctcacttcaaaagagagtgcgagcgcgagggcacgcgaagcctgggaagctatttgcatcaagttccactgattcagctttctttgacttttatttgtacaattagctctacagggaagcgatgtccactttccatttatctttgggtaggaagttttcttttcccaaaacatgtgtttgtgtttttattttaaaatgaggccatttaaagaagcacgttaagcaaataatcactgaagggctctgcagattcagcagaaatcagggccgtggtccttgaacggaaagagttgggaaatccgagtttcgtgatgagaagcccacattgaacggtgagggagggcagaattcacatcccatccctgccatcttctgtctgggtggccttaggacagtaatgaaacctcagttttctctggggctaataatagtacttgcaggagggagccttggtggaggttgaaggagatttcagagtgcctgacgcaggacagctgcagcggtaggatcactctaataatggtttacattgtggaatatgtatcccagttagtactatggccaggctctagtcccagcacactgtatcaacacatttaatcctgcacacccatttcacagatgaggaaactgaggcacaaaggtgttaagttactagctcagggtctttcagcaagtaactccaaagtccacatccttaaccatcacaccacgtggcataaagcaggtgcccagcaggcagttgccgcagtggctctggctgtcatgaggtgtatgtttctgcagacgagagattgagaaggaaggtgttgttcaccctctggtcccatgaaactcacagttctcatgtcagacgactgcatcgagtgtgtccccagctcccctgaaattgtgactctcagagccacctgggaaggaggcattgagcggagcctgcttcctgctcccaggggaggtgctagaagggagacttgctgtcctggccagcctgacataggatacaggtccctgaatgaagtaaattagggtgcgcatcagggcagctgggagagttgattgaaagcactgttttcagaggcaggtgggcaaagggagcaaagaaatgatgctgcaccgaggaaccggtagcaacaggagcccttactttcccgagacttgatggggcaagaggagggagaggtgaactcagaactggggagacgctagagccaggaggggccccaggcaggagctgcatccacacacacagacacgaaggctactgcctggggagctactgcgtgcgggaggagaataaatgcacggacttcccaccacctcccatgctgcagcctcccagccggaagccagagagcagggacgtgccgaccgtgccatctgtagagctcagcctcccagggtgccaagcagagctgggggagaaatggagcaggagtgacccttcctggggtttttcaaccatagcgctgcccagagaacacagtggccagctcctcgttggtgtccatggagggtggctggggcaaggcatcagtgatggacgcctctgagccatgtagacccaagctatggcacggccctgccaagtccagcttccctcactctgcagaactcaaaggaccttagcagaacctccgttcctttatttatctatttctttgtgccaaggcctggagacagccatgaataacataagcctgtctctgtcctcagggagctgaccccctagtggggaagaattggacaataaataagaaattgcaggctgcagtagtgattacaagagaaataaaaccggttataaaatgcagagtgcctgggttgggggcccccgctttaaatagggtggccagggcaggcctctctgaggtgatgacgtttgttcttttgacagaaagagccaggagtacaaagcaggagtttgttgttgttgttgttgtttttgagacggagtctcactctgtcacccaggctggagtgcaatgacatgatctcggctcactgcaacctccatttcccaggttcaagcgattctcctgcctcagcctcccgagtagctgggattacaggcatgtgccaccatgcccagctaatttgcgtatttttagtagagatggggtttcaccatgttgatcaggctggtctcgaactcctgacctcaggtgatccacctgcctcagcctgccaaagtgctggaattacagatgtgagccactgcgcacagctgcgggagttatttttaaaagagcaggtgcaaagaccctggggcaaagagaagcttgacttgtccattcgacagaaagaagccagtagggctggaaaggagaggtcgaggagaagtgggcaggggccagatctcacgggccagggcagccctggcaagaagtttgcatcttatcctgtgagccatgagcagccagggaaggtgcggcaggtgagcacaggactggcactaaggtgaggcgagtgcctggcacttgtgcagcctgggagcgagcacccccttcagtctgtacctgcacgaggcactgtgccctcccctgcccagtgctgtgatctgatctgtattttaggaagattcctccggctgccctgggaaaatggaggatgggggcagggaagagggaggcgggagacccctcaggccaccttgcagtccccaggagagatgaagcaggcagcacatccccctgctgaacccggagaccttgctgagcctctgagtcatgactttgagctgatggctggggttccccatgaagggcaaggacaaacagaccctttcaaggtcacagcaacacagccacccccacagcacttggcttcctcccggcacatctgcaggctgtggctctctcgctcatgctctcttgttttaaataaatgataccaaaagtctatatctggacaggacttgaaggctcatttcctcaagaagtgaaaaaatgaccacggagagcaaagagcagggcgagattagagacctgcttgagccagagtcgcgtccccacctccccgcacccaccttcgctggtgacctagtctgacctggggccaggggggtgactgagggcacagtggcctgtggcaggtcttccccctccaccttttagcgctcaattttctctattgtcatttcatttattctgcaacttaaaactaataggctgggcacagtggctcacacctataaccccagcactttgggaggccagggcaggtggatcacctgagttcaggagttcaagaccagcctggccaacatggtgaaaccccatctctaccaaaaatacaaaaaattagccgggcgtggtggcaggcgcctgtaatcccagcttctctagaggctgaggcaggagaatcgcttgaacaccaggaggcagaggtcgcagtgagcccagatggcgtcattgcactccagcctgagcaacaagagcaaaactctgtctgggaaaaaaaaaaaaaaaaaaaaaggaatacttttttgcccaactacaagatcccttaacaaggggctttcacacgcatccccagcagactgaaatcttacaacagccctgtctactcattttgttcatggggaaaccgaggttccaaacgggcttgctcacgggaaaactgagccagtgagtggaagatctgccactcacacatgccagttgtccagcccaaaacatccagctccaggctctcgtttaaacccctgattgaatcccccgctgctggggagctggaacttcatctccctcacctctgtaccccacggtgcgggcagatgcaagaggacggcaaatattcaccccttgagaccagcccgctgctgttcctctccctggggacgatttgtctgtggagttgggtggattattcagagacggctgttatctgactcgggtcttgggctgccaccgacacatcagaggctcactggatccagggaagaaattgtttctgcagaagtggccacagaaggcttttctgccagtctgttgaccaagcaaactgtaaagactttgctaacttcagcggagttcggttttcactctgccatagccacccctgttcaaagaaactcccattgttcatgccagccgccatacaaatcattatgcaagaatgagcagccggcagccttgacataaatattgacctgattcttcctcctcctctagatctgcgagtgaagagggacgagggaaaagaaacaaagccacagacgcaacttgagactcccgcatcccaaaagaagcaccagatcagcaaaaaaagaagatgggccccccgagcctcgtgctgtgcttgctgtccgcaactgtgttctccctgctgggtggaagctcggccttcctgtcgcaccaccgcctgaaaggcaggtttcagagggaccgcaggaacatccgccccaacatcatcctggtgctgacggacgaccaggatgtggagctgggtaagcctcggggccccagggtggcacctcggcccctcggagcagggtccctgggttaggctgaggctcctgaggcaaggcggtggtgttgatgcgtcgtgctcacttttgagtacattgaaaccaagacacgggccacccacacgtgtttggggtcacaactgggtcctcaaggttaggggtctctacccttctccagttgcacaaccgttcctggatttctccaaagagttaaagagaacaggctgggcgctatggctcatgcttgtaatcccagcacgttgggaggccgaggcaggtggatcacctgaagtcaggggttcgagaccagcctggccaacgtggtgaaaccccgtctttactaaaactacagaaatgagccaggcatgatggcgcacacctgtaaccccagctactgaggagactggggcacaagaatcacttgaatccaggagaaggaggttgcagtgagtggaggtcatgccactacactccagcctgggtgacagagtgagactctgtctcaaaaaaaaaaaaaaaagatgagacatgagcctggagccaaattttggaggctcttgtgggttgtggcaaagactgtcaatcattgatcccgtgaagggtgatccctcagcctctgtccactcttaaaggataacagcgtgttgttggtggcaacaaatgtgaaggttgactaggttagccttgacaacctgaatttgtcttttagctaccaggaaaaggcaatttacataaaaccaagttgttccttgcaatgctttgtattaatgatcacaagtatagtttttttcctccgggagcttctcagtgcagaaagaatttgtagccaggaagcaatcagagcccagagcttttattgacaatttgacacataggatacctatctcctggcagcatttagaatgaggcgcatttgataactatggggagtctgcagactgtggccagagaggtgtgtttcgtttcttgaagaattttgcagaggggtcttgcaggcagcacctggacctcagagcttcttggtctcacattgtgtagccccgacgctgtttcggctatagtcatgcttagaatttccgatgccctgcacgtttgttcattcatccagcagatgtttattacgcatttgttgcattcagtgcactgtgtcaggagccagagaactaagggaggctcattccaggtgaggagaacaggaaattcaaagatactgagatagaaatgggctcggtggtttggagcaaaaaaaaaaagtgccagggagccggagtggagggagctggggccgtgatggagagagatgaagctgaggagctgacttggcccgggttgcaccaggccttgtggccatggtgggggctttgagtttgattcttagtaaaatagacatggatgagggggccttaagaagaggaaggccgtgacctcacttaggttctaacaggatcccccagctcttttgatgaaattaaatcgcaggggtaagggcagaaacaggacactcattcagaggccgatggggtgatagggcagtgatgatggaagctcagacccgggtgctgagatgcggtcccacctgatgtatatttgggaaataaactgatcaatgggttaggtatgtgggttatggaaaagatacgtttcaagggcagccgctagatttggggcccgaatcaacaggtgagtggctgaatacccactcttaggaacaacacatttttgcaacatgatccagctaagtctcatgtctgaatctgactgaattttgcatctgtgacttgtgaataaaaccaacagtgtatgcagataaaaagaaagcaaaggcatatgcagatataaggaaaccaacagcgtatgcagatacaaggaaaccaatagcaggtatgaagtagacacaggagagaggggaacaaagaaagccgtggctgacttaaaatacagagatttcttctctccatttgacagatggaaaaactgaggcagagagaagtcacttgtccaagtttgcacagctagaatgtgattaaacatgatttgagctgggtgcagtggctcacgcctgtaatcccagcattttgggagcctgaggatcacttgaggccaggagttcgagaccagcctgggcaacatagtgagaccccccccgtcttaacaaaaaatgtaaaaatcagccaaggatggtggcacacacctgtagtagcagctaatgggaggctgaggtggaggatcacttgagcccaagaggtcaaggctgcagtgagcctaggtcacaccactgttctctagcctgggcaatagaacaaaaccccatcttagaaaaaaagagaaaaacaagatttgaacccagaacgcgtgatcttagccactgctctatttagccagattcctgggatggatattgagttgttttcagattggtagcgtgtgcgtttgttagtttttcactgttacggatattgttgctggaaatttaaacaggcatcgttgcacagacaagggagtgcttctgaaggataaattctaggaggtggatgcggtgggtttagagcccctggtgttcagtggcctgtgtcagctcttgcccaatagcactacacagcatagattagggcctacaagtcttgccctctataaacaagccagacctcttccaccagcagcactgggttttgaaggaggcaagggatgggaaggtggttgtgggaggggcatgataggctttttataaaccactagacagacccagatcaataatgcatgtcccaaaaaagcccaatacattatctcacagtctctgctacaactggcatgcagcgggtggtcctaaaaaatttatcatttgctattttctgcccatccgtgcagcagttctgacagccctctgggctggagacttcttgactgagataatcccaggattctttccagtcccaggacagagaacagacgtccatcctcattagggtccggttgggaggactggtgccagatacacaagacgaggggcttgttctgtttcctaattgcaaggttggggggttcggggctgtaccacgtatattcaattttcctttccctgcacgcatttgactccctaagctgtcatttggaattatcaaatgcccaggggaactgcttccagggccatactagttcgtaagtggcctaaattatcattacatgtttaaagtagttggggacatccctgtgtctcaatggccctctgagaccaacggacttttgctggacttccgctccaaaagaataagagggaagcacatggaggtaaaggtctcgtttgcagacgtcctttgttcagggaggcagtagaatctttgggctctgccagggtttactgatttaatttgatctaaacctctggggagcctctggggctccagcaggctctgagacagcaagaggattaagacatggttctggcctggagcaagagaatttttgcagcatcccagttctgatctatgacttgagaatttctttaactggacttatttttgaagcttaaatattattttaaaaggaacctccaaattctgactgtaaaggaaaaaaccaatacccattgccttcggcaaaggatcactgtaaaaccaaacacagtgaaaaccaagtcgtgtttttaaatttcagcaagatgctgcctcccagaaagccagtgtgtctctactgtaatgagggtgacgggcagtttcagaagcggcattaaaggtgaagtagcacctgccaagactttcttcttggcctcatcagcaggatagagactagaaaagagaagaactttctcaagcttttgatgtgggggtcccacttacatggggaccacttggtggtggctcttgtatcagagggttaaggacacagccagactccaaaccccagaatatcagagcggattccccagtgctcattttcctgagtgttcacaccaggcagagatgggtgccttttcgaggcccctcagattgtcggatttgaagtgtgccccacgagactgcatccagtgtttgcatttcttttcttttctttctttttttttttttttttttttgagagagtctcactctgtcacccaggctggagtacagtggcgcaatctcggctcactgcaacctctgcctcctgggttcacgtgattctcctgcctcagcctcccaagtagctggaattacaggtgcccgctaccacacccagctaatttttgtatttttagtagattcagggtttcgccatgttggccaggttggcctcgaactcctgacctcaagcagtccgccgcctcggcctcccaaaatgctgggatcgcaggcgtgagccaccacacctggcctgatgtttgcatttcaaaagaattctttgcctctcagaacatctttatttttatttgtttatattttttgagacggggtctcgctctgtcacccaggatggaatgcagtggtgtgatcactactcactgcagcctcgacctcctgagcttaagcaatcctcttaccccagcccccgaagtagctgggactacaggtgcgcaccatcacactcagctaattttgggagtttttggggttttttttttttttttttagagatgggcttttgccatgttgctcaggctggttgcaaactcctgagctcaaacaatccgccccccattggcctcccaaagtgctggaattgcaggtgcgagccgctgcacccagcctatcagaacatctttaaatgaaaatactccgagtaaagttgcaagggtaagagctgtctcattagccaccaggttcaaatcctcactctaccattgaccatgtgtccttgggaaagatttgccctctctgtgcctcagtttactcatctataaagtggagatgatgatctgtttccctggcattcttgtgaggaatacctggcacctgtcatatgtgtgacagtttgctctcacttgggttgttaaagccatcctctgttagagcaccctgggccaatgccacagtgttgtttgtctacagcaagctttgcatatcaaaacgacattaaaatctaaatgtctcatggcactgaacagcaacattagagtctcctcccagctgacacagtggggtgagtgctgtccacgctcatgcaggtgagctggcacccactctgccaggtatgtgagcctggcatggttacataccccataatttgagtgacacttgtcaatcaagtttggcatgggttcttctgccattactgcctctgctgatgaacagagttgcaccatcatggctgttgaaaagcaactgagtggtggttttggggcctgcaaaagtgccatgggaaccagccttccactgggtgttaaaaacgcgtgtgtcacaaccactctctgtcagcctggattctctcagttacgagtgatgtaaacccaactcgagcaggattgaggaatcaaaaaggggactttattggactcatatgaataagtccaagtatacattgagcttcaggtgcggctggatctaggagctttgtctctgggtggcctctgtccctccatctccctgacctcagctttcctccaagttggctttactctcaggccagctctccaggcagcattcctggcatcactagacccacatgaacaccatacaggtgcaagccatccctgtggaaagagagcttctctcacctagaagagagtacccaaattgagtctttttggtctgacactgtctgggacttctggtcaaccagattcaggggaatggaacacagtggttggccagatggagtcaggtgcacattcctggagccaggactggagccaaccccacttgaaccatgaggactgggattgggatagagcagattccccaaaggaaaattcagaagctagtgccagaagaaggcaggtagctggtgtgcagtccagttagagagatgctcgtgacaccctcacatggcgctctctgaagcagctgctcaaactgtggaccagacttattcattcggcaggtgtttcctgagcacctactgtatgccaaaggagatccaacagcaaacaaactaaacagagcttacattctaatgcaagagttaacaagacacatcgaatctatagtacataaaagagcagaaagtgaggaggagaataaagccaggaggggaagccaggaggggcgatcaaccaggagaaaggtggagaaaagaatcgctgggattttctatagggtggtctcattgggaaggggaaatctgagcaaagaaggtaaggaaaccagtcaagggggatccctggggaagagcactccaggcagagggaacggtgtgtgctaaggccctgaggcagatgcggtctcagcaggctcagagccgcaaagaggccagagcagcgtgcacaagagcagcaggaagaatgaacggtaatagggaggtggtggttggatggaccgtgcaaggcatgagcctttgaatgggaggaagattttggctttctgagtgagatggacaccaatagaggacattgagcagaggaggacattgagcatctgatttgtgtcttcataggacccctctagaagaatagactgaataggtgtaatgagagcagggtgtccagtaaggagtctactgcaacagtccacgcatgagatgagcccaatgaggagtctattgcaatggtccaggcatgagatgatagcggttcagaccagagtgaggaaagtagtaagtgctggtcatatttcaaaggtagagctgatacaagtgctgatggaactgatgagggatggtaaagaagagttgagaatgactccaaggttgtggcctgaaaaactatgagaatggattttctgtgtacagagatggggaaaaccatggttagaagctgtgggccgggtgcggtggctcacacctgtgatcccagcgctttgggaggccaaggcacgcggatcaagaggtcaggagatcgagaccatcctggccaacatagtgaaaccccatctctactaaaaatacaaaaattagcggggcatggtggcacacgcctatagtcccagctactcgggaggctgaggcaggagatttggttgaacccaggaggcggaggttgcagtgagctgagatcgcgccactgcactccagcctggcgacagagcgagactctgtctcaatacatcaataaatcaataaataaagctcagttctggacctgggaagttgcaggtgcctgtgaaaagccaacaggaactgtccaataggcagccacatcagtcagacgttgaagagagaggcccaggcctgggtggacttagagtagggcacggtggggatcgtatacaaactgtgtgcttgtttgtgctttactgaatctgagaccctccccagatcctgaaagttgcaggaatacagcctggagaactgtccagtgggagaggcaggcttttgaaagaaagatgtagcagaggtctggccggcctcctgttttccactttccatctgtgaacacaaggaaaccacaccctgtgccacagcctgatatccaggagatcaattccaaatcgcaggctcaagtactctctgtaggggccagatggctggaagcccaggacaacatacccagattccagacaccagatcagtggtaacttccagctcagcctctctgagatcccacctcctggccttctagccgctgatcactagaggagaaaaaacatgtggatgcaggttatctcaggaagaagagaggctcattcggacccacactggtgttcagcttgccaagcacattcctgtaagatgattttttttcaattcagcaacatttgggagatcacttgagttctggaagttaagtgtatcaggattaggtttggctgcatgtaaaagaaaacataaaataacagtggcttaaacaagacagaattatacaaatgtctggaggtaggcagtctagggctggcttggtggcttcaaggttatcagggacccaagctccttctctgcctttctgttccatcatacttactgcgtagcttccatctgcaaagtcaccttgtggttagaacagctgctggagctccagctctcatagccacactctaggcagcaagaagaaggaagcagaggcagaagggcaggaaaaagaaaaaaaaaaaaaccacttcagaagtcacatgcaacacgaatagatcttatttacttagccacatgatctcagcgagaattataaagcacatgcaaatttgaatcattggaagacggtttaagtgttttttgctaaggtgtgagcaagtgcgaggaaaccactagggatagggcagtgccccaggctaattagcaacagtgggacaagaggttactggaacccagggacacagagggtcaccccacaagagctgtcaccctctgttggcaccacagagaggaaggtggaggaatctgtccaccaacctcactctcttctttctccgatctcctgccaggggcccttgtcagtcaaatccaacccaaagcccagagagcgaaggggcttgttgaaccagcacctccaggccagtgccctggggtggagaactggacagagagcagggctggaaggcggcaggcaggctcctggcacatctttggccataagggaatctgggaaatgtttcctagctgggtgcattgaaaataaagtcacagcctgatcagaggaagaaggagaaagagatatttgtgggcaactgagggtctcagcaacaccagagatcaggagcaagggtcccagtgagggcagctcccctagcagtgggaagtggggttgtgtggcctaacactggggagacctgtgtcatgaggagacattcatgtggaaacccgaggcaggagcactgcaggcagaagcacggcacgtgcaagagccctgtggcaggaacaggtttcccaggacgttggaggagggcagcaggacatgggaatgaaggggaggaggatggggaagagggcggcagagagcagacaggggagacctggtggtccccagcaggccatgcagcagggtctggatttgattgcatgcccgatggaaggtccccagaatgttctgagctggtcagctatgcgtgcatgttctcagaggcacaccccggctgtaggtgaagagggtggcccagggacaagagcggaagcagggagatcaggtggtgtttgcagcagtccaggtgggagatgctggtggtacggagcaggacggggcactgcagagcgagagaggtgggtggattccggtgctgcttggaaggtcggcagggtttgctttatggatcgtgagtgggtgggtgagggaagaggaatcggggatgactcctaggtttttggctgagccgttgggcagatggcagtgccatttacagagatgggaaggcgggggcaggaggaacagattgggagaggtggggaagggggggacattaggttgctttgcaaacatcacccaccaggcctgtggctgggcagcagctctgcgtagccccttctgaaaagtggggaaaacaccctggaagccctgccccattgaataaatatcccctcccagggatggtgattgtagcattttgagttagaggaatatttctgggtggagtttctcagagaggaaatgaccaatcattgcagagcctcgtcaattacacccaagccctgccctttcccacgtgtgctctgccacctctctgctatggttgacgatgaccatagcagaattttctcccaggaacttctgcaaccagaggcagcagaaagcaacggagaaaaaattaactgcatggtctctctgacaacccgatgcttattaatagaatctcagtcctgcctcctcgacatctgcctaattgattttgggtttaggaaccgatttggagccttggcttttcgtagctgaaaccagcaataacatttgtctttattttgtaatgtccaagagtcaggaatggttcacctttgcaccaacaaaagaaaaacaacaacctctgagcaacaggtctccagaatccagtgtaattattctggattgagttacaggcacagcaagagttgccaccagcagcagtgagcacatctatactaggtgaaaaataagagattccctttttatgtgtgtgtgtgtgtatatatatatatatatatatatatttttttttttttatttatttaagttctagggtacatgtgcacaacgtgcagttttgttacatatgtatatgtgtgccatgttggtgtgctgcacccgttaactcgtcatttacattaggtatatctcctaatgctatccctcccctctccccccaccccacaacaggccccagtgtgtgatgttccccttcctgtgtccaagtgttctcattgttcaattcccacctatgagtgagaacgtgcagtgtttggtcttttgtccttgtgataatttgctgagaatgatggtttcgagcttcatccatgtccctacaaaggacatgaactcatccttcttttgcccaagtgtggctcccgatttctgctgtttgtgccccaggcctttctctcccctctgctggagacagagctattctggggcagttggtcaggtctgatggagcccagcctgctgcagcccattagcaggtgttgccttggtcatggcagggagctcacaagctgatcctacagcactgcggacattccagggacatttgagggccaggagagggctgctgaatgagttccagcctgttaggtggacaccagtagccagaggtcagtgcaggacacaggttctttcccgcctgtggctcgacctcatagccctcttcatcccccacctgtccaggtcaagactctgttccaacctgtacctgaccccacagcctctcttccccactgaatgcctgttctctgcaggtctctgggccccagtagagcgttacctttgcagatttatttagctgctcccttcacttggaattgaatcagctaagggttgcaaactccatgcccacagggctaggcacgtgctggcaaggaggaagtcggcatggtaggggtggtggaagaccagaggaggaccttgtcaagtgggccttcgctactcaggtccagcccactgtgggcccatcaaagccaggtctttgcatttttcaagcaaagccagaaagctgaattgatgtgaaatctcgcaattaaagaaaaaggccattcaatttttaaaatcctttccttttgggcagacctaaatcaaacacacatgcagacaagatttagtctagagggactccgttttttaactccgcgtgagacgatacttgttgaaaagctgacatgtggccgggcacagtggctcactcctgtaatcccagcactttgggaggtcaaggcaggtggatcacttaaggccaggagttcaagaacagcctggctaacatggtgaaaccccatctctactaaaaataaaaaaaattagccgggaatgatagtgggagcctgtaatcccagctactcaggaggctgaggcaggagaatcacttgaacccaggaggcagaggttgcaatgaaccgagatggtgccattgcactccagcctgggtgacaagagagaaactctgtctcaaataagtaaataaataaataaaagctggcatgcattaagtgctttctgtatgtcaagcattgaactaaaaaagtgtgtgtgtatgtgtatatatatatatatatatatatatatatatatatatatatatattttttttttttttttttttttttttttttccctcaaaactcagaacaaccctgagaaggaggcactgttattctcccgctttgcagatggggaaactgaggtgcagggtggctaaatcatttgcacaaggtacctggttaataggaagtggcagaaatcaagatttggaatcaggccttctgactgaaaacctttttcatcctattgagtatggtgacatagcgataggttctagaatctatcctagaatttcatagtcaaaccttatacctaaagttatttatgggctgtgtttttacagacagggaagctgaagctcaaagtcagtgatttacggcagttcacacctcattcttggcctctcaattcagtgctctttggcacccaaagtctacagatgaaaaaggacctggtgattcagtctaggactgaagtgtatatgtgcatctgtttgtgtgtgtgttatacacacacacacatattcatttgtagcagctgaacccttttaacatacaaaacaaaacaggtaagagaggaatcaggagaaggacgcggcctggagaggggtgtgtggtgcccccttcatcctcagcctgccccatgccaggtggactttaatgcccctctcctcaaggaaagaaagcacagcttgggggcccctgggagcagactggccccaggtagagtgtagcaggtgatatgtggccacaacagtggccacagtggataacagtgttatcccaacactgggaggccaaggcaggaggatcacttgagccctggagttcaagaccatctatagatttttcggtcatctatagaaagcccactgtgtgccctcttcccctaaatcccagggcctgcttcacataggggtagcacacagacaggcctgcagacccgtgcaggaatgccaagtgccaaatcctgccctctcccattgttctagaaacctgtggccctcttgctgcatttatttattttttatttattcaggagttcaagaccagcctggtcaacatggtgtaaccctgtctctactaaaaatacacaccaaaaaaaatagctgggcatggtggtacttgcctgtaatcccagctgctcgggaggctgaggcaggagaatcgcttgaacccaggaggtagaggttgcagtgagccgagatcgcgccgctgcactccagcctgaaagacagagggagactccatctcaaaacaatcaataaaattacacaagcaaaactttaaaatatccaagtaatgcaaagcagagatagcccttgactccccacccaccgtgtaccccactcaccccaaaggcacctgcatgtcccctaagaatctgtagcctgcatgtcccctaagaatgtttactcttcatttactcacacggaagcaccaggaagagcagcaaaaggcaagaaggaaggggagggcatgattctaatcagcacagtccagagaaagccttgctgagaaagtgatatttgcagaaacctgaaggcaatgagggactgagtctgggctgaggagtggcaggtgcaaaggtcctgaggcagaagcgtgcttggtgtgttcgaggaacaacaaggaggaggtcaatgtgactggagcagaggaagcttagagagagagcgcacagtaggagttgtagttggggcgagtgagcatccggatcactgaggaccttgtaggacagagggaggactttgatttttactctgagtgaggcgggcagtcactggaagacaaagagcaacgaatatgatgatttcactgactgttttaaaagaagtcctggccaggcaggcatggtggctcatgcctgttatcccaacactttgggaggccaaggaaggaggatcacttgagcccagcagttcaagaccagcccgggcaacgtggtgaagccccacctgtacaaaaaatacaaaaattagctgagtgtggtagtgtacacctgtaattccagctactcaggaggtggaggtgggaggatcacctgaacctggggaggtcgaggctgcagtgagccgtgatcacactactgcactccagcctgggtacagagtgagaccctgtctcaaaagaaaaagcctctggccaccaaacggagaatagaacagcttgggagcctactgcaatagtccaggcagagaaaacagtgattagagtgaatttaagtcaaggtcctgtgtttactgactccgcctttatttttctccctgccccattcttccttctgctgctttccctaggaggccctgccatcacagactctaataatatctataattttaagaaactagccataggaaggcatctcactagttatacatcaaaatcacccaagttgagggccgcagggatttgtctgggaggggtacagggttcccctgctcccagctgaagcaggcctccaacagataggagccacctaagcctcaggaatggcaaaaaaaaaaaaaaaaaaaaaaaaaaaaaatcatgttttgaatcctgaaactccctggcaccttgctaagtccccatagatagtgtttgctctgacttagacctttagaagagcaaattcattcagcatttcctatgacactggcaacgtcgtcatctgtggcaggtcagcaaaatattgattttatcaacgatggacttactggatggtgcatccaaaaatatatatatataactcacaccttaattctctaactcgacgtagttaacttggattgagattaaagggttttttcttaaatcacgttaaatacaaatatcaaacaaatcatagcacagtggtacacaggcccccaaaaagccaccgtgaatggggaggcagttcaggagtgtcatgggagaaactgcattctagcagttgggtggtttgggcccccaagtttaaatcccaacagatgggcctgggggtgaggcctctccagcccatcagagtcacagaggtgtcagagtgacctcaccctcaacccagtatggtgggaaggtttggtcatggaaagaaaccgggtctgtttttgtctgcatgtccccaggtttatgttggacgaaagaagttgaggttggctggcccagctgcattgaaaagcttgaaaactggccttttcatttctgtgtggccgtgtcgttcaggtccttccctcccgtcggagctgtccttctgcattagggctggggctgggcaaggggatgagatcatatgtttttgtgttacagaggtaggtttacacagcctcgtcgctatggcagttttaataaagcaggttactgtccccaaggggaggcttagcacatagcactgcccatgcacagatgctgctgtcattccggggcactgttgtcctttactcgtggattgacacagcgctcctccgccagctgatttgggaagggtgagtgctggccaagagcacctcacagctcgcttcctctggaatgaggaggaaggagatctaagcatttcgagaccctggatctgagcccattaaaaacaagaaatggttctggaggctgttcactgtttgccaaggcagcactgggggctgcggagtgcaggtgatttcatcaggtgacggcctgccctgcgttcccttccaggagaagggtctgaccagttaggtgggtggccagcttttgtcctttctgcagggtctggagaccgagagaggctgagctctcactaccagctgcttcgtcctttctccttcgtgtttgggactagggagcaaaggatcgattccacttggggtgccctggactcgtgcatttaagaaatatttatgagcacccactgcgtgccaggcactgttctaggctgagctgtggagccatcaaaagtcacagggaacagcaaacgggatcagtagataaaaacataaaagtatatcatgtgttagatgatgagtgcagggttgaaaatgtcaggcaaggaagggagtagaaaatattgggggccagggaagactccacggagaagggaacttttgagtaaagacaagaagggggtgagggcaccgctgcggggctccgggggagaggtcttccaggcagaaggaacagcagggcacaggttctgggatgggagcacgcctggtcagtctgtggacagagcaggggaccctgtggctgcagagagtgggcggagagggggatggggttagggaggggaggggattgggtcccaccacactctgtggatggccagaaagatttgggctcctctgagtgagcaggagccccggagagtgtcaggagaggagactctggctacaccgtggggaataagtgactggagtccaatcaggaagcaactggcctgatttcagggagagaggatgatcgcctgacccacgggggaggtggcaagggtacgatcgtgggtgtttacgttgaagagagggcaacaggctttgctgatggattggatgtgggaactgaaagatgggaggaaccgtagccaagatgattgcccaagtacccggaggaaaggggagtggcttcgggaggagcaggagggacggtgacatcagggcttggctgtgggtgtggcacctgaggtctaatcgacagccgaatgacatcaatggatgtcagggttgtaccaagccacacatcaagggatgtcaggtccgggttttaccaagccaatgattgccaaattctaatcattccctcacaattttcatcatatatctgtgtgccacttgtacgattatttactttttaaaaatcggctgcaattgtttgttgttgttgttgttttaagaggatttccaccaccctaaaggaaaagctaaggttacttgccctaagtagaaggaaaccaagccacgcaattaatctaaggcaatgccaccccctgcctggagctcccagtggcctttcacaccaccagcatccctggtgtttggtgatgtgaccctgggccacccccacccctggtgtgcctgatgaagtcaccactagaggacccccttctgggtcaccaagggaccattctgagcttaactgaagccaagagtggaccaagagcatggggacctctatgcacttcctcaggacactgttaccacctcccgtgtgactgtgacattttgtgaacgtgaaactcagcaccccgcctctgctaggcttgagtcttcactgccttcccagctgtgcagccttagccagtcattcagctccccaggttcagttccctcttctgtcaaatgggccattgggagaattaagtgatgaatgtcttcagcccagccataagcattcagccagtgatagtcgccactattaattataatgattattactggcatagaagactgccctcttccccaggaataagttggagtgctctcagttccttagctatatcagaaggttgcaacacccaagccttcaggggtcgggcaggtaatgagagtgggtgcaggtggtgtaagactgtagggagcacgggggagtgtggcaaactggagagcacatatcctgtgtgatgctatttaatgtcacatttttaaaacccactctacaagacaccaacacacaggtctgtggacaccaactggtttggattcctgagatatgaaaacccgagtgtaagatagtattttatatgttaatttagctggtctctgttgagcacattatgtgccaggcactgtgctaggcagtgaacaaagtaggctgagtctctgcccttgtggtgaaggcagcaacatacaaataagtgaaatcaaaatgacttatgtttgaggacagtaactgctgtggagagacacggagcggggaagcagagtggagagtgctatgggttgcgggaggtggtttcaatacaggccagggaaggcctctccaagaaggtggtgtctgatcaataacttgaaggagacagaggtagccctgtgattggaggagtgagagcatcccaggctgggggtacggctgaggcaggggccaggaggtgggagggcggccaatgtgcaatactgggacctcaggggcacgaccttggtgccttgattggtggtaaaaatttaaagtagaagcagctgattgctgagcagagggccttccccagatcccaggaggctgcagtgggtctgatgcttgttttcaggtttctagggggttgctaggtgattgggatcacagccttcacatgcctggtagaccctgttttggtttcccactgctgtcctaacagatcacaaactgggtggcttaaaacaacagaaatttactctctcaacagttctggaggccggaagtccaaaatcaaggtgttagcatggctgtgcttcctcagaaggctctaggggagagcccttccttgcctcttccagccctggggaccctaggagttccttgttccttggcttgtatgtgcatccctccagtctctgcttccctttgaatgtggccttcccctctgtgcctgtgcgtcttctccactttgtgtcctatgtggacacttgtcactggatttagggcccacctggggaatccagaacaaatctcatttcagtagcctcaatttaattacatctgcaaagacaccctgtattggtctgtcttcatgctgctgataaagatatacccgagactgggtaatttagaaagaaaaagaggtttaatggacttagttccatgtggctggggaggcctcaggatcatggcagaaggtgaaaggcacatcttacatggcggtaggcaagagagaatgagaaccaagcaagagggaaaacctttataaaaccatcaaatctcgtgagacttattcactaccaagagaacagtatgggggaaacaacccccatgattcaactgtctcccatcagatccctctcacaacacgtgggaaatatgggagccacaattcaagatgagatttgggtggggacacagccaaaccatatcaccctctttccaaatatggtcacattcacagcttccagaaattaggacatggtcttatctttaggggacgggggcaccgttcaacccactgcacaccttaagaactgcaaggaaaaggggaaaaaccaaggatggccatagaagaaggagagagggtttccatggaatatttccatcaaatcactaagggtctgggtaccaaccacagcatacaattgagcatgcactcgtcacacctatgttgagtacccactgtgtgtcacacacggcagcagtgctgaggattcagcgctgagcggagcacacagcctttgccctcctgggaccttggcctgcacgcagtagggctcccacacacgttcatttgcttccttccttccttcttgcctttcttcctaagtgtcttgctctgcttacagcttggttgagaaacaagagcaggcatggccaggcaaggtggttcatgactgtaatgacagcactttgggaggcagaggcaggcggatcacttgaggtcagaaattccagaccagcctggccaacatggcgaaacgtcatctctactaaaaatacagaaactagctgcgtataggggctacttgggaggctgaggcaggggaatcgcttgaacccgggaagcagagattgcagtgagtcaagatcacaccactgcactccagcctgggcaacagagcaagactctgtctcaaaaaaaaaaaaaaaaaaaaaaaaacaaagaaaagaaagaaacaagagcaggcatgaccgaaacctcgaagcctggggtatgatcagtactcaggacacatgctgcaagactgctcagagctctcaagcccagggtggtgccagaggctccctacgagagggtactaggccgatgggttggatttggggtgaggggtggtgggttccaggctcgaagaaaagtgtggacaagaggccagcagggtttgtggctgatggcagagcacctcagccagggaatactcagggagaaggtttgccaccaggttggcatgaccagatttcagtaagagcaaacaattattgggaaagttccaaagaaaagaaagtataatcttccctcaatttacatggtggttggtttccaaaagaaaaaacaaaacaatgtatattaataccctgcaaaaacaatgttgtgtttaaaatttgtaaaacagtttgattccagtctcaggtcatttataaacaggtttttacctgccttgcaggtagagatgcaattacagtaccggacagtgacagtacagtcacttacagtcactcacctccagcaccattgcaaaatcctccagactccagacctggacctcaggagtgtccaggtggactcgggacccagggtccttcctgattatgcaggacagtcccaccgtgcagcagtggcccctgccccgtctgccccgtaggtctgcagaatgtgcccactccagacctagggatgccacgtgctgagagccccctggtgccggtgccgcccgggtctcctgccctgcgccttacttccacccttgacttgcaggttccatgcaggtgatgaacaagacccggcgcatcatggagcagggcggggcgcacttcatcaacgccttcgtgaccacacccatgtgctgcccctcacgctcctccatcctcactggcaagtacgtccacaaccacaacacctacaccaacaatgagaactgctcctcgccctcctggcaggcacagcacgagagccgcacctttgccgtgtacctcaatagcactggctaccggacaggtgagcagggacgggggcaggtgcaggaagggagtgacagccagggcgggcgtccctaggtgtggtctgcacaccactgcggtacccaagttgattctggatagcccctagagcaactctcttataatttcagagttgtgcatttatttctgtgtgtattaaagaaatacagatttatttgcctacagtagtgatgtaaagtgaccttgtcaaaggaatttgagtcccccaaaaaagtgagtcttttcaaactatgaatcatagtgtggagaggccataaggtgcccatgcatgagtttgcatcctctgttaatagttattaagcccatcagggactgtttcgttgacttcaaaccattagcttggaagaaggttccaaaacataggggtgggggatgggaattcatggaggggaacagataatggggctgtgtggtcgctttctacgtggcagtaaccaaggtggtgcagaaactgacatggtggttgactgtccacactcacccgtgtcatcctgggtggagggcgacccagttcctgtttgcttatccttcaggaggtctttggtgggctctgaaggctcacctgccaggctggttgtctgaggtagagatgcaattacagtatagtcacttacctgtagcgccattgcaaaaccctccagactcaattcatttaacttgctttaattaaaaataaataaatactccccgccttgggtaagaagccgcggcggttgtgaaatcaagatattgtggctcagatgttgcaaccccaggaagttgcatccaagtgacaaggggtttgtttgggtgggagtgccgcaagggaaggatggactcctcctccagccctgtccgcagtgctggacctgcagccctcgaggctgggcagcttcctctcagatacacagtgtgggctggcagggatgctttggtgtggggagcaagccagtaaggtgtgtcttcttacagcctcatcccatagccagaatcacctagaaagtatgttctgctgagaactaggaaggcctcgttcctataccttgttcctgtgtattgtgcgtgccattatgcagaatcaaccacctgttggttcccctgagcctctgcagaaagccacatgtgtcagaagttaccatggccaccaccctagatgattggcgggggcctggatgttgctagcagaagcaggacaggcaggcccgcagcacagcagtgggcccttattgaagatgcacctgcaacttggctctagaaagtacagccatgcactcaagagtgaccagccttgaaatgttttaaagtctgaatatttcactgaaaatcttattttaaaatatgccggcacagcttattttttctttaatgtatactgggggccaaagaaaatatgtctgaggagtgagtgtgtggctcacagactctcttttcacaacctctgggtgaaaggtctgtacagaaacctttcgttttggatgctggaagatcagtaaagaccctagacctgttctcatcaatccccctcatttcacagccagggccactgcagcccaaaaaagagacctgcccagagtcaaagtgaggtgtttgtggcataatcaaaatggaatgcaagatcatgggaattcagagggggcatggaaatagtattcatcagactgaaaggaaactcatatattctgtgccattttgagggctcagggtgggagctaaaggctagtgtttcaaaatcttacaggcgacatgagaaaatcaatcatttcaagaataaacattctctaaagtggatttcccaaacttgtccttgaatgtatgcaaatcaccaaaaagctgtctccctaaataagtgcttttattcaactatgattcattattataccctcatgaagactgggagcgtaatgtcaagtgtaaagagccagataccgagaacatttacgtttttgtaaaactgccactgagaattttattcattatatttagaatgccactctgtacaaagaatcccattccagccttactttcagaactcaggaccctgaaaacacctgtttagtctgatgaactggtgtactccttgttattacataataagagccacataccctgtatagtttccctctttgccctggcagctaggaagctcaggtttgagttttatattgagttgttgtttaaagtggaaatgtttttaaagatccaactgcgtgatatgttatactgatcagtgttgactaagaaaaatgacaaaaatctataatgaattcaaaaccttttagattattttttccttttagattgatttgtacatacatattagaatatactgtaaatttttaatcccccaaggaccaaaagtaaattgttcctgctgagtcttcagccatgttaaaccctgtgttcacgtggccacctagcaaagttggttcagttggatttaagtttggctgtgtgtgtgagagagaccggggatgtcaaataaaattccaagttgttctggtggccctgctctatgaagtggtcagagactccgactccatttctccttatttcccattggtgagaaacaagtcatatggccatgcatggcagcaaaggggcctgggaaatgtagtcttattctaggtggacatttgcccagatgaaagttattttactgtgggagaagaagaaaacggatactgaaggacaagtgaagtctaggccaccctaacagttattagccatttgtgtttgtgatactcgtttgaatagaggagatcagcccaaactgaggaagactgaccccagaaaaatgctacttaagtggaccaacatttcataataaatagtgcttttaatgtatttagtaaggtatttgatcttgaaatgaaactacaatgtttcgagaataactctgttatgttacatctctttttttctttttctgagacagagtcttgctctgtcacccagactggagtgcagtggcacagtctcagctcactacaacctctgcctcctgggttcaagcgattctcctgtctcagcctcctgaatagctgagattacagacgcctgccactacgcctgactaatttttgtattttttgtagagatggggttttgccatgttggccaagctggtctcaaactcctggcctcaagtgatccacctgccttggccttccaaagtgctgggattacatgcatgagccaacgcacccggccctctgttaggttgcatctaatgatatttaacaaatattgggctctagttgcaactaatgagttgattcttcaagcaagtgaattgacgaagtgtagggaggaatataatgtgtttcacaaattgaaatggatggcacaagatgatatcctttacttcactagggacatttttgcaaaagtatttgaggatttgatcaattttttcaagggcctctcctaattctctgacatctgaatcttcccctgtgaagtgcatctcatacttcatcatccttctcaatagtctcttctccttcatgtagtatctttatagaccaggtaattattcgtcagtggatttgcatgtgttttttgagctatcttccagcgtcattttaattaattttacaaaccctgcatcttttaaaatatttgcaatttcattttgcagtgatcttgctttgcatggccccatgtttgcagtggagattgacaaaagacaaaatgagagaagctaagtttaagcaggataaatatcaatttgttcatgaatatttctctgtatggcttcttacaacttgagggacttggatctcagatatgaatacccttggaaggatcaattgcatcctcaggttttttgttttctttgtttttttgtttgtttttgagacagggtctcactctgttgcccacgctggagtgcagtggcgtaatctcagctcactgcaacctccacctcccgggttcaagcgattctcctgcctcagcctccccactaactaggattacaggtgcgtgccaccacgcccagctaattttttgtatttttaatagagacggggtttcaccatgttggccaggctgacctcgaactcctgacctcaagcgatccaccctcctcggcctcccaaagggctaggattacaggtgtgagccactgcacctcgccacatcctcagtttttacaaaggttttatagtcatcctttaacacagttcagcagttgaagtgctgttgccctgcctgtgatcacttatatatccacaagtcaaagttgtacagtgttcccagaatgagacacctcccagctctctgcagagtggttgagggcattagctttgcctgggtttgaatccagtctctgctgctttctgcctgcatgaacttggacaagttatttagcttctgtgtcttggcctcctcaaccacagttaataatgtcacttaactcatagagttttgtgaagattaaatacattagaacagtgtctggtacatggtcgtggtaggcacttgggaaatttagcaatgatggctgggtgcagtggctcacacctgtaattccaacattttggggggccaaagtggaaggatcacctgaggccaggggttcgagaccagcttgggcaaaatagtgagatcccttctcaatttttaaaaaacagtaataaaaaaaagttagcaatgacgatgacgatttgcacaatagcacaacatcacacagcccacctcaggccagtgttctgatgaatgtcatggtaagttgcactcatggatcaaaatgtggcagcatgtgctcagcctctggtaatcagcaaaatgcaaacgcagccaacagtgcattatcacatcccagccatgaccacagcaaatatgaagaggtcccatcgcaccaaatgttggtgagaatgtaggaaaacaggaaatcatatgcgccagcagcatgatggtaaattgttccctccactttgaagaacagtttgccaatttctggcaaagctgaaaatggacatctccttctactcagcaattttactctggctgtgtccccctcggttctgaggaggtgatgttgatgtgtgagttctgcttgagcaagggaacacacttcctggctgccctgtttgctcttgaagatgtgtgatgctcatggcaatagattccctttagatccaacggacaggaaccccgactgcagctggcttcaaaaacattgaattttttgctccctaaacaggccaggcacggtgactgaagcctgtgatcccagcactttgggaggcagggatgggcggatcacctgaggtcaggagttcaagaccagcctgaccaacatggtgaaaccccgtctctactaaaaatacaaaaattagccaggcatggtgatgtacacctgtaatcccagctacaggggaggctgagacaggagaattgcttgaacctgggaggcggaggttgcagtgagccgagatcgcaccactgcactctagcctgggtgacagagtaagactctgtctcaaaaaaaaaaaaaaaaaaaaaaagagaagatacaggtgagtagcaggcagagtcggatcttgtggtttacgagtatcatgatcatatcacgaggctggaggtctggacatggtggctggcactccagcagctgtgtgcctccttgtccacatctggcaggagcaagagagcatccttttccagaatgctcaaggcatgagatcccttctgattggaccaccctgagtcacatgccagcccctgagccaatcatcatataaagcacatggtttgtgccaacttgcccagcgtggatcacctgctctgcagcagctggctgagtccctttttccccagcacttggactgccaggtagaaatcaagggctgctggaaagaataaggaaaagcatactggagtgccgatcacaattttactacactgcctttggcaaacaaaaaacaaaaaaaaagtaacatcagctggccgggcacagtggctcacgcctgtaatcccagcactctgggaagccgaggagggtggatcacaaggtcaggagtttgagactagcctggccaacatagtgaaacccgtctctactaaaaatacaaaaattagctgagtgtggtggtgggcgcctgtaatcccagctactagggaggctgaggtatgagaatcacttgaacccaggaggcggaggttgcagtgagccgagattgcaccactgcactccagcctggtgacagaatgagactccatctcaaaaaaaaagtaacaacaacaaaaaggcaaccttttccagctctttctggtgaactagattggagtgccattttctccccattgggataatgcctttctccttccacacctgaatctggcagttctgaagttgtttcccagccccagcttctgccatccggtccagactttcgcagagatggtggcgggccctctgcccttctgcatcatgttctaaaatgcgtcaggggagcagggggtacatgctccttacaagaccaggccttgccagggctctcagttggagcctgttttggggtttggccctgagcgccccagttattttcactcttctcgcacaaagctgggtagagaggtcagctgaggaccagaacctggccatcagccttgggcagctaccctcaccagggtctggggggcctctgtgtcctgatgaccccaccccatctacactacactacacttggggcaccccatcgccctctcacacaggaggatggaaaggcgcccgctaggcattttggcatccccaacaaatgagacttgttttttccctaaagcggtttcattcaggaccgcaggggcaggagggctgctgcgtgggccgtcctcctctgcaatgctataaagtggcccaatgcccctctttccctgccactctctggatctacccttagccccttgccctgaaccccatccaccctggcccctctgcctcctggccatcgccccagagctctccccagcacatcaagcatgagtccagcatcacttcctggtcccccgcctccccggcgcctctcacaggcttctcctcggcacctccagttttccagttgctcaggccaaaaccttagcaccattcttgattttttttttcctattcctttcacactccacattcagttcatcagcaaaccctgtcagctctgccttcaaaatatgcccagagtcccctctgctgccaccagcccatccgcgccactgtcttccccgcctgccctgttccaggtttctcctgggatcccccagcttctgcgtttatgaccccttggtctgttttcaatgcagcagccagaggggtctggtcagaacctagttcagatgctctttctcctctgggcagagccctccttggctcccacctactcagggtagaggccccgacagccacctcagggtcccagtgatccttcccttctctctgaaccctctcagcctcctggtctcccctcagtcactgtcctccagccacagcttctcaagcagtcagccacacctgacatgcacccactcacagtgctttgcacttctttccttttctcaaaacttctacacgtctgcactttcctcgtgtctgtgttccaatgctgcctcctcaaagaagccttccttgactaccccatgcctcctgttcatcccagttttttcccaccagtgcccccatcaccactgaacaccactgactgtgtattctgcccatttgtctcattgattgtctcgtttctaaaatgccagctctcaggctgggcgtggtggctcacgccagtaattctaacactttgggaggctgaggcgggtggatcacttgaggtcaggagtttgagactagcctagccaacatggtgaaaccccatctctactaaaaatacaaaaattagctggatgtggtggcgcaagcctgtaatctcagctactcgggaggctgaggcaggagaaccactggaaccagggaggtggaggttgcagtgagccgagatcacaccactacactctgtcgcttgggtgacagaatgagactctatctcaaaaataaataaataaaatgccagctccctggaagcagcggcctctgttctgtgccctcgcgggttgccaggcctagagagtgcccaccccatcgtaggtgctcaggagaccttcccaggatgactggtgactaagtctccacattctgtccccgccagcagcccacccccatctcttccacactcctttctcctctcccgtttctctcctctccacccccactcccaccatctcagcctttcctcctctttcttctcagcctctctgcacacacagggaagagaagactgaaattattcccgggatgccgtccctgggcccctggtgcagctgtccctgccttcacaatggcagccttctctttgcttggctcttctcctgggtttgctccctgctctcttcctctctccttgagtgcacacaagtgtgcacgcacgcacgcacacacacagctcccttcttccctcggtccagctgcctctcatctgcccatcttccctccccctctccggcctgtggggggacagcagagcctctccattcaccccgtggagtgtatccactgctcacagcaggtagccttcctgtctctctgcagcgaacacccagccttccccactgtggggatccgagtatccacgggaattgcacagcccctcctgggacccaggctgacccagcgtgtcctcgagaggcacggatttgccgcctccgtgcacatcttcaagcgaaatttcttcctctaatttgatagtcacttcctttctctaagacctcagatttcaaaataagtgaagcacttgttttgagcaagagtctaaagaattagactccgccttaagcgcccttgtgaccttgagctgagacctcatcccctctgggcgtcagtctctccatctgtgcagcagtgttgtgacatctaagcactagtcacccagtgcctgtgataagacgccaccctgagtgatacgtgacctgtgcccacaaacccaggaggagaggttccctgcgccgtaagaggaagtggccacggggaaagaggaagctgatgtgaggccgatggggcagggtttccgattgtttccaggcgacaccctctctgtcccacccccttagcaggtgtatccacttccctagtggaccacagactgggtggcttagaacaaaaggcgattttcacagttccgggagccagaaccccaaaatcaagcatcatcagggccacgctttccctgcaggcttcaggggagggtcctttgcccttgagttcctgggggttgctgggaatcttggcaccccttggcttgtggccacatcactccagcctctgccttcatcttcatgcggcctcctccctgtgggtccctctcttcccgtggcctgctcctctctgaatcagtgtccaaatttccctcttctgtcaggacaccagtgattggactagagcccgctctgatccagcgtaacttcatcttacaacaccatgttacaaacacggtcaccctcacaggtacctgggcaaggacttgagcatatattttggggaacacattcatctcgtgacggctggtttctttcacacattaaaccccgcccccccccataaaggctgcagagccgatgtcaaactgagcaaacctgccgctcttcccctcttcactgccccagctgtggtcctgggtggggagcagtgtggccgccctgaagatcagctccatgcgtagccttcccttcccaaccatggtttctctcaaggaatctccacctgcagtgggcgttgaaacagctgcagggtcaaaagtgagggaagggtgactgtggtgacagacaggcacaccctgtctcctgggcctcaagaggcttccgggggtttcagagtgcatgagaccttttgtagtcctctcctaggtgctagctgtgactccctgaacattctggaatgagttaggctggagccaaatggcccagtaccgttgccactagccacagggagctatttaactttacgttaattacaattagcatttcagtttctcaggtgcactagccatggttcaggtattcagtaggcgcacatgggttctgtactggataatgcacatagagaatgtttccattggcacagaaaggactcttggacagcaggagaatagagcctatggctgggcctgtaatcccggcacttggaaaggtcgaggcaggaggatctcttgaggccaggagtttgagaccagcctgggcaacatagtaagacctgtatctttacaaaaaatttgaaaaaaaaaaaattagctggacatggtagtccatgcttgtagtcccagctacttgggaggctgaggcaggaggatcacttgagcctaggagtttgaggctgcagtaagccatgatcacaccactgtacttcggcctgggcaacagagtgagaccttgtctctaaaaaagaaagaagaataaagcctaatcaaacaaaatcttttgggagtggggagtgacacacagcactgagaaggggcaataaaaacgcagggggtggtggctgtcgaactttaggtgagtgctttccgtgattcctcatctgtaatccaatctcctcctcctcatccctgcactcacttccccttatgctcccagtaccttgatctgtcttcccaaaccttcctgggtctcgggtcagggtctcaggacaggttcctgttctccgagcagcagacaccatccatcccggggccagcaggttgtgccagcccacacagcgagtcctttgggaatccatccgtgtcgcaggggatttgagcaaatgaagggaaaccgagttcctacaccgaggccgggagcggggcttcctctgtcatccctgtgtgaacccgttctagcctgggggctccaaatgcatagagggctggcaggtagcccaaagcagagaggcaggctgggtggggagggggtgcccagatttcaactgtggactgttcactctactttttaagaatgagcaactgaaaacaccgggcaggcccacagcaaacacacctgagggatggattggtctgcaggccaccggcttgcaaacttctttctaagctggtggttctcaagggagcacaccgccccctaggggttaaactctgtgactgcattgccggtgatggtgaaggatttgactttgctggcttyctgggggcggagactaagaaggaytytgatgtcytgctctgcacagcagagtccacgtggcccccacattgcattgtattccacatagcttctgagtttcctaccacatcactcatatgggtagattattttatgtttattgtcatctgagtcttgaacctacgtctattttatatgtaaatactggagggtttttgcatattcccaggaatgtacggaataagaaaatggaggcaatattatacttgagtgcaaaactttcccaagagtcattccttatttctgaaagtcccatccccgatgacagtgctacgccaaaggatttgaatggcaaatgtcgcccgcccacccagctgcccttgtaattgtcacattcccagtgaatctgtgtctaggtgcaggcgtctgcctgactactgtgttgtgccttcttgatggatgtgctgggggaatttcatattgaaatttatcttcattataaattgctttccttttattttccctgtagattgcagttagagcattatattgattttgtggaaatgacatgcataggtagcttttgttacctataaatttcctttcaagaaaacaagggcgctctacaaaatatttgtcatagaaatgggaggtcagtctgatggcgctgagaacagctctttgaaaggtgcaagtagtgtcagattcctccaaggcgataattaaatatccattgagtgacaggccttgttctgagggtctgttgtggattttctccccctcctctagtccatccctctgaacaaaaccacactttaaaaggcacaagacagatatttaagacacagcttgtcctcgtggtgactcagcaggcaataaaacctgtcactagagatggagccctccatacccagctaattgagtttccagggaatgaatgggcctcatcctcatttgcaggagctgcaagacccttctagggagcggatggctggagccagcatttaattaggcacaggcagcccgccctccatgccaccaacacccagagctccgcctggccctgctacaaccagtcagcagggccttggtgtcccccgcagcccagtcttcctcaatagccacagcctcactaaaaacaggcaggcggaagacaggaatgcatggagtggcaagacagaagcagctctcgcctctcgccctggcgatctgcttgtccctgtttgtccccagcaactggccattccttctccccacccacagccggaggacacttttaaaaattgtaaacctgaccacatcacttccggctgaaaacctcctacggctgcccactgctttttggataaactggcatctcctcgccagggctgccaagaccttgtttggcctgggtgtgctcacctctctgtccacatctcctatctgtcccttccttggtgacagcactcaggctgcctagcctctttgttcctcagaacttccaaggtccattcctgccccaggccctttgtatgtgcagttacctctgtctggagcactggcccacaaccattctggtacaagcaaccggtttcgtggaagacagtttttccacggactgggggtgagggatgttttgggatgattcaagcgcatttcatttagtgtgcactttatttctaatattatcacattataatatgtaatgaaataattatacatctcactataatgtagaatcagtgggagcccgagcttgttttcctgcaaccagatggtctcacccgggggcaatgggagacagtgacagatcatcaggcattagattgtcataaggagtgcacaacctagatcccccgcatgcacagttcacaacggggttcacgctcctatgataatctgctgctgatctgataggaggcagagctcaggcagtgatgcaagtgatgggaagcggctgtaaatacagatgaagtttgctcactcgcctgccactcacctcctgctatgcagcccagttcctaacaggccacagaccgctacctgtctacctgtctgcagcccaggggttggggatccctggtctagagcgttgttcacacactgcggagaacttcctccatccattctctcttccttcctgcccttcctgtgtcggttagtactcctcaaccctctcattctcgaccatgacacccggctttatgttcttcttaggacttctcgcccccttgaaattatcttgcatgtttgtgaacttttttttttttcttttttttgagatggactgtcactctgccacccaggctggagtacagtggcatgatcttgactcactgcaacctccaactcccaggttcaagcaattcccctgcctctgcttcccaagtagctggaactacaggcacccaccactacactcagctaattttcgttttttgttttggtttttttttgagacggagtcttgctctgtcgcccagcctggagtgctgtgccacgatcttggttcactgcagcctccacctcccaggttcaagcgattctcctgcctcagcctcccaagtagctggcattacagttgcatgccaccacaaccggctaattttttacatttttggtagagatggggtttcaccatgttggccaggctggtcttgaactcctgacctcaagtgatccacctgcctcagcctcccaaagtgctgggattacaggcatgagccaccgcacccagccaatttttgtactttagtagagacagggtttcaccatattggccaggctggtctcgaactcctgacctcaagtgatctgcctgcctcggcctcccaaagtgctgggattacaggcgtgagccactgcacctggcgagtgaacttgttttttacatgttttgtttgctgcccatccaaaaatagcaccaggcaggtattgggtactcagtaaagatttgaacaaggccaggcacggtggctcacacgtgtaatcccagcacttcgggaggctgtggtgggaggatcacttgagccaggagttcaaaaccagcctgggcaacatagagagaccctgtctctacaaataattttaaaaactggccaggcatagtggcacacacctgtggtcccagctctttgagaggctaagatgggaggatcacttaagcccaggcctttaaggccgcagggagccatgatcgtgccactgcattacaacctgggcaagtgaaacctcaactcaaacgaataaaaaaaatgaacagatggagaactcttgggccttaggcttgaagtcagcaaaaaaataaaaacaaaatggaatttagattactatctcatttatccagcatgaagaaacataatcgaaattagttcaggcaaactttgccaggtcccagtgctcaaacgctgtcagaaccctgtctttctgcttcttgcgttttctgtcattgggttggctttattaggaaggttccctctttgtgatggcaagatggcccccacaggtccatctccccagtgtggtgaccccagctgaaagagaggcctctttccaagggctccagcaaaagttccagggaaagctctcattggctcatctagggtcttatgtctctttcacccaatcacagcagccaggcaaaaggagataccctgattgtccaggccaacctcatgggcctggtccaggattcagagctagaaagagcctcatcagaacatgtaaggctgagaaaggggaaagattggttccctccctctttggtgactgaaggcacaattatgaaaagacaggagaatggattctgggcagaaaaataaaacagatatccactatagaaacccacatgcaggccgggcgcagtagctcacgcctgtaatcccagcactttgggaggctgaggcgggtggatcagttgaggtcaggagttcgagaccagcctgaccaacgtggtgaaaccccgtctctactaaaaaaatacaaaattagccaggcgtggtagcgcatgcctgtagtcccaggtactggggaggttgaggtaggagaatctcttgaacccgggaggcagaggttgcagtgagccaagataatgccactgcactgcagtctgggtaacgagtgaaattctgtctcataaaaaaaaaaaaaaatagcttcttcttaaagggcaagtgggaggagagcatttctcccagcccccagctcgctctgcttccaacataagatgcctctttcgtgcggaatcatgaccccaccttcctcatttgttttcacacagctttcagttcagcaagatcccatctctggcatccagaacttttatagcattgatttatcacttcgtgcagtgatttgcatttggtattttttttttcaaaagcagaagaactcgactcaggctgtaaccttgcaaagcagcacaaagttaaaaggatccagttacagaatatcagaaataccccagccctgagagctgtggagctctgggtttatttaatgcatttcttgccagccctgcctcctcagccaatttgtctgccaaaaaaacaaagacttcagtcctgtggcatttcacatctaatatttatgctgttctagagtttgcaaaagggcttccttttcatttatcactgttcctcaggaacctccagctcccctgctaggttaatgggattgttctctgctgcccagaccgggagccccaggaagccaaatgacagatcatgaaagtggcccagtggaggactcttctactggtgtcaggggtaggatcaaaactcagcctgaaccagctcagtttctattttgtgaccctgggggccaaatatggatcttgcaaaatggcagctggcagcctgagtctacacttcaaccccaaatttctgtcagagttacaagatgctttttaaaatctggaaatttaaccaaaaatacccagattacaaacttctctttaaaaaaaaaaaaaaaaagattatgataggcctgtaatcccagcactttgggaggccaaggtgggtggatcacttgaggccaggagttcaagaccagcctggccaacatggtgaaaccctgtctctactaaaaatacaaaagaattagccgggcgtggtggtgtgcacctgtactcccaactactcaggaggctaaggtgggagaatcacttgaaccaggaggcagtggttgcagtgagccaagatcatgtcactgcactccagcctgggtggcaaagtgagaccctgtctcaaaaaaaataaaataaaataaaggccaggtgcagtggctcaagcctgtaattccagcactttcagaggccaaagcaggtgaatcatgaggtcaggagatcgagaccatcctggctaacaccgtgaaaccccgtctctaataaaaaatacaagaacaaaattagccggtcgtggtggcaggtgcctgcagtccgagctactcgggaggctgaggtgggagaatggcgtgaacctgggaggtggagcttgcagtgagtgcagtggcactccatcctgggcaacagagcaagactctgtctcaaaaaataaaacaaaaatttgaaaaagataataatgataatgatggtattgccattactggtaacattcctgcatggtggagattagtaaactgtggcctacaggagtctgctgccaggttttacaaagttttctggaacacagccacacccattagtgtatgtactgtctgtagctgctttggctctacggtggcagaattgaatcattgcaatagagaccttatggctgcatagctgaaaacacatagtctggccctttgcagaaatagtttgctgagccctcctaagtggcgccagcccactggatttgtgccacagatacccccaggatttattagaatataggtggagttgagggtacttcagtccctaattaacagcggattagagatgataggtgcttatttctctcccatttgacagtttgggcataaacagcctagagatgatgtggcaggcatggtgttggctcccaggctcctgatgggtgatggtcagatggcgttccatcatcctgggcgatcgtccttatctaaagcagcatcccatcctgtctgcatccaaccagcaggacacagaaactataagggaagctcacttcccttcctggaggggagtttccagaagtcacacaccacctggtgtacccctccagttcatagaaaatacagagaattacaaaggaagccagttatatgaaaacatatttatcaaaatattttataaactgtgatatgtatgcttctttacacataaaatggcacgatgaagcagttatttaatggacaatggataggtctgataacttccatgatttcgaagtagcgctggctcaaatgatattttaagaagtccatgttgactacaatgtgatatgaaaatatccgtaattcccattggtgacaaagtcccagggaccatcattcataattgaaggggatgctagttataggttaatgaaaataaacaaatacatacttttgccattcaatttcaggaaattatatcttgggacaacagattaagaacctcttcctcaggtgatctgattcgattccatggcattaagtgccatctaaatgcttacagctcctcagtttgtaattccgtagcttttctgtgaacctggtctgtttccacctgaatgtctaacctgagtctcgaggttaatgtgtctgatttctttatcaacccccatccccaactctgcccctcccagtgtccctttcctaaataagggcaaatctgtcctcctcattgcttggaccaaaaaccttgagttatccttgactctctttacttctttcgcatgccacatcagcaaatcccattggttccacctttaaaaatagcctggaaccaaccacccaagcccttcgcctgccacgattgtggtcatcacagtctgtctcctgaatgactgtgagagtctccaaacattccagttccctgcctcggactggccttaattctaggacagaagctccaggaagatgcaggttttttgctgctttaattttttctgttttgttcactggtatccccagtgcctagagccatcccagccacacaggagtcctcctttaatgtttactgattgaatgaatgaatatataacatcatgatcaataatattatgataaaaacagtaaccatttagaggcagttaacatattttctcattgaatctttcccagcaactttgtcatgtagggatattattattattcctattttgcagttgagaaaactgagctggaaggcagaggtagctgaacttaaatgcaagctgttggctccagagcccatgcccagccctcagacctgcctgcctcggaggataaaaatcatttctgaggccaggccaggtggctcacgcctgtaatcctagcactttgggaggccgaggcaggtggatcacgaggtcaggagatcaagaccatcctaaccaacaaggtgaaatcccatctctactaaaaatacaaaaaattagctgggcatggtggtggcgcatgcctgtaatcccagctactcgggaggctgaggcaggagaatcgcttgaacctggcaggcggaggtttgcagtgagccgagatcgcagcactgaactccagcctgggtgacagagcgagactccatctcaaaaaaaaaaaaaaaaaattatctctgaaaccctacacttctggaaagactgatctggataacgactatggctcctacctgtgtcccccacctatgcttcaagaaaggcaaagtgcccgggtcctgggaatgaccttccttcaaaagcccacggccggatgaattctgggaggatgcagcatgggaagataacctcagtgtggaaattccctttgcctggaattctggcagaaagcacttcggagatagtctgagccacatcggagaggaggagctctcggaggctgagtcccatttgtgtgtgtccccacctttagccatggggcagtccctctgctgttccctcttccctgcctctctgcgtccccgtggatgggaagagctccagtctgtggtcgctggagtcctgctgagaggctgaacagggtagtcaccaaaaggcaggtggagacagacaacctgggattgagcctcatttcagctctgacacttggcagttgtgggatgttcggtgaaaaggggactttgcctctctgtgcctcagtttctccatctgtaaaatagggaccaaaaaaaggatctacctcactgggatgttgtaggtcatcgtctaaaccagtggctctcaaagcgtggtcccaggatctctagactcaaaactattttcatgataataccaggacactgtttacctttttaccgtcattttccttctggtagacagtggagttttctagcaggtacatagcatatctagttatctaaaaaggattaaaatactcttcccttttccatctgcatacccattttattttattttttagaaatagggtctcgcttgtcacccaggctgaagtgcagtggcacaatcacagctcattgcagcctcgaactcctgggtccaagtgatcctgccacctcagcctctcgagtagctgggaatacaggcacacaccaccacgactggctatatttatatatatttattttttagtttttgtagagatgaggtctcactttgtcacgcaggctggtctcaaactttttgcttcaagcaatcctcctgccttggcctcccgaagtgctgggattacagacgtgagccactgtccctggcctgcatgtctgtgtgaggctggatttttcatgttaaacaaccaaaacaatatatctcagcagattgaatgccaaaacagatttaagaatcctgctgccttccagtaaacaagacattgaagagattggcaaaaatgtaaaacaatgcaactcttctcattaattgtattttgtttgggaaaaatatagttatttatctttttttctccccaagacagagtcttgctctgtcactcaggctggagtgcagtggtgcaatctcagcttactgcaacctccacctcctgggttcaagcagttctcctgcctcagcctcccaagtagctgggattacaggcgcccgccaccacacccggctaatttttgtatttttagtagagacagggtttcaccacattggccaggctggtcctgaactcctgaccacataagtcatcacgcccagcctctatttatcattttttaaatgtatgctaacaagtagtgagtttattatttaaatgagtgaacaaatatgttttaaatttctcagttttcatctctaatataataactatcactagatataaccaacatacacaggactctgggttccttaataaattttgaccatattgaaaagcactgctgttgccttacactgaccttgagtgcttttttggttttataaagcacatccacaaatggaagtcatgtcccgtgtgggccaaatagatccaagttcagccagccaaacaccatacaagcaaataggaagacaagaatttaacaattctacccactcctccactcacagagggtgtgcaccggatgataaaaaaacaaatctacgttctcagccaggcgcagtggctcacgcctgtaatcccagcactttgggaggccaaggcgggtggatcacttgaggtcagctcaagaccagcctggccaacatggtgaaaccctgtctctactaacaatacaaaaattagccaggcatggtggcgaacacctgtaatcccagccagtcgggaggctgaggcaagagaatcactggaacccgggaggcagaggttgcagtgagccgagatcgtgccattgcgccccagcctgggtgacagtgtgggactccatctcaaaaaaaaaaaaaaaaatcgacattccctcactcagctgtgtctcccacaggcctcccattacgaggtgttcgttggttcagttgtttacccatttattccacaaacgttcatcgaggtctcgtcactgaccaagctctgttctagatgtgaggacacaggggacaagggactcagaaagccgctgccctcatggggctggtactctggtgggagaagcacgtgataaaaactagaagacagataaatatgaccagtgaataaatatgtggagaagcaatgtcgggggaaaggggagagcctgggcggtgtggggagatgccatttgaataggagggttaggattgagccccagtaagttaacatttgaggctggacatggtgactcacacctgtaatcccagaactgagagaggccaaggtgggcagatcgcttgagcccaggcattgagaccagcctgggcaacataatgaaaccctgtctctacaaaaaaaaaaaaaaaaaaatacaaaagttatctgggcatggtggcttgtgcctgtggtcccagctacttggaaggctgaggtgggaggatagcttgagcctggggaggttgagggtacagtgagccacgaccgcaccactgcactccagcctgggtgacagagtgcgaccctgtattggaaaaaaattaaaagctttgagcaaatagctgggaaaggtgaggaagcagcccatgcaggtatctgaggaaggtgatttctttcaggtaacagcaagggcaaaggccctggggcaggtatgagctttggggttggggtgctggtaggatagagggagaccccaggacaggaggctggggggaaagtgggggcagatgcagtcacggagcaggacaggagacagttataggactttgtagggcatggcaaggactttggattttagttgaggtggatgtggagccactgaagggctttgcacagagtggggggcttgawmaaawwtgtgatttaatgggatccttctggctgctgtggaagatgggctgaaggtggaggcaggaggaccagggacgaggttccagcaaggtccaggcagaggcagtggtggcttggaccaagatggtgacaggcggatgatgggaagtggtcagacctggatgtgtcctgagggtgaagctgctgggacatatgtgagggaggacagaggagctgaagtcccctccatggtgcgtagccttgacccactggcattgacggatgtatggatcacagggcgaaaatcaagaggccggtgtgaagtgctgatttgacaccaaatgaagtgatttgaaggaaattactaagtatgcagcggtccaaatgatacataaaaacggccaaacgtgtgtgagaggcacgcggacaactggaattgagatgatgccacgaagggcaaagaccccgttttgttttcgcagactccgtgcctgcgaaatggcgcgggtctgttttgggaaggacggactttccacaggcttctgcttcatctttcgccgacctctctgaattgctttggcaaacactgtttattgtcattggctcggctccgcgctccagcccatctctgctgatagatgtgtgtcatgctcagccgacttcactgtgcggcatgaacactcctccccaagctcattactggagtctcggaggggccttgccattttccaaaacggtgtcacatctggtttctaacaaccatttttatttctccagaggtccaagttttcatccccctccctgaaaacggaaagcagactgtattttgggaactcacagttcttttttgtttctgtttttttgttttttattattttttttttttcagagacagaatctcactccgttgcccaggctggagtgcagtggcacaatcatggctcactgcagacctaaactcctgggctcaagtgatcctcctactttggcctcccaaagtgcttggattacaggcatgagccaccacgcctggccctttttcagagttctttatgcacaatctcatttgttgctgcccccatttttatagaagaattcactgaggctcagacaggagcactcgcttgcccaaggagtcagagtcctctgactctgcaaaccaagctctttaaagccacactgcaaccctgtcgttaatggtacatttggacaactttttaaactgtgcactttacacagagtttcacaacctcggcactggtgacactttggggctggatcattctttacggggggaggagggccatcccatgcactggaagatggtcagcagcatccctggcctctgcccgatagatgcctgtagcacattcccccaccccgccaggtcatagcagtgaaaaatgtctccacacactgcccagtgtcccctgcagggcaaaatcacccctggttcagtgtattctgcacacagatgtgcttcaggttggcagccctgcctgctccgttgacccatttttttcagcatgtagcactgtgctgcagacactataatagaaatcccttcctttctttttctccccccacccctgccccccagacagggtctggctctgttacccaggctggagtgcagtggcaggatcttggtccactgcagcctccgcctccacttcctgggctcaagcgattctcccaccccagcctcccaagtagctggaacgacaggcgtgcagcaccacacctggctaattttttggttttttggtagagacagggcttctccgtgttgcccaggctggcctcaaactcctgagctcaagcaatctgcccatcttggcctcccaaagtgctgggattacaggcgtgagccaccacaccaggcctagaatccctttcagtaagacatgcagttgccacctctcctgcactcctgggcgaggggtgtgacgcttaacattagagggcgctgccccaccttgcacagctgtgtacctcaatcaggtgcacctacccagccctcctgtcggccactgctcaccgtgtgcacactctgggccaggtactgcgctggggctacagtgcagcacggctcctgccttacggaccccacaccctagttggggaaatgaggataaacaagaaaacaaatgcatctataggataatttcagagagtgcagagtgctgtagaggaaataaacagcccggtgactatagagggatgggtgaccagggacaacttctcatctgacctgaggtgccacggtgaggaggaggcaggcgtcccaggcagaaggaagagcaggtgccaatgctcggtggggtagagagcttggctcctagggagcgtgagacctagagaagttgaaacagagtgagctcagcagtgcgtccctgaagggagacggcctgatggctcttggactcagaagggccctctggccatttggggaagtctgggctctgggaaggctgcggaggcagaagtccagttggaagttggctgtgagaaggaaacaggtgaagaagcaagatgcatttctgtcttttttgggattttatatcctgtgtatatgtgtatgttgtgtattcgtgtatgtgtgtatatgtgcttttactgtattttcctgcatcgtgtatatgtacatatgtacctgtatattcatgcattgtgtatatgtgaatgttgtatatctatgcatgtgcgtatgtgtgccatatattaatgcatatgtgtatttttatatgtcatgtattcactcgtgtgtatatgtgtgttgtatattcatgtatgtatatgtagtgtatttgtgcttgtgtatatgtattcatgcatgtgtgtatatgtatgtgttgtatatttatgcaggtgcgtagatgtgtttgtgtgctggttccaaaatatgaggacaaattgccaaatcaaagtgaataaatatttaatgaaatggtgttgcatgattcagcgagtcagctctggaacatttggactcttagagagctgtttgtcgattacctttaatgtagtgtgtgggtggaaatggtgtgggatgaacatgtaccgaaagttgctgatgtccttaaagaagccctgttggtatttccagccagatggcccgtcgtgggggagagaaagtcctccgaaagcagcgggtgctttctgtcctgctggctgcctcttgggaggcccctaggacagatcaggtcctgtttcacccttcgcatgcctgtcagttcatccacgtgcatagcagtgggtgggggtgcactgtcgtttcattgccaacaaccacaggggacaaagtcctttgtggtcccacagctaggaggtggcagatccaggattcaaacccagacagtctgactgcagagacgctttgggcactctgccacattaccacctgtgttactgggaaaagggagaactgatgctgggaggaacagcgtgttcctacgccggcccggcatggcggggacatgtctgcagcagggagaggtggccgaggttcccagtggtttctggttgcaggagccctctgtctcccccattgtccgtggcttgcttagtatccccagtgatgccgtgtgtgcccctgtgccaggtttttcaccagctaatctcagtccctggtcgccacgagacacagctttcacagaccacaaatgcaattattacaaggcaatttcagttagatttggggctgggagagaaaacagaagggtctcctcctcccatcaggctccgaatcgttccccaggagcacttaactcagacaaatggggaagcagccgcgtggagcctccaccgtagagctgcctgcaggggaagtggccgacctgctgggccacgaagcagggtgcaggaaggatatggggagctagtgatcctctccaagggggcagggggactccattaaaccagatgttaacagcaagaagttggctataacaggggacgggcccattggtggataatgaaaatataacccttagtaggcacttgctatgtgccagttccaagcaatgtacagtcgtgtgtcacgtaacaatggggatacatgctgagaaacgtgtcgttaggtgattctgtcattgtgcgaacatcatggagtgcattacacgcctggatggcatagcctactacacacctaggctctgtggcgtgacctattactcctaggctacaaacccccctacagcatgtgaccatactgaatcctgtaggcggtggtaacacaatgggaagtatttgtgtatctaaacatacgtgaacatgttaatagagtacagtaaaaatatggtgggcatggtggctcatgcgtgtattcccagcaccttgggaggccaaggcgggaggatcacttgagcccaggagttccagaccagcgtgagcaacatagtgacaccccatctctactaaaaattaaaacattaggctgggcacggtggctcacgcctgtaattctggcactttgggaggctgaggcgggcagatcacctcaggtcaggagttcaaggccagcctggccaacatggtgaaacctggtctctactaaaaattaaaaaattagctgggcgtggtgttggacacctgtagtcccagctactcgagaggctgaggcgggagaatcgcttgaactcaggaggcagaggttgcagtgagctgagatcatgccactgcactccagcctgggagacagagtgagactccatctcaaaaaaaaaaaaaaaaagtggtttcaggtaagagtggatccccagggcctcaaaccagcatctctctatctctctatctcttgtatctctctatctcttctgtctctctgtctctatctttcccacctccgcatttttccatattgctttacacacacacacacagactcttccctcttggtggcaagatggctgccagcagcttcagttatgtatcccaccagttccaagccttgaggaagaagaccttctcttttctagtagctccctaaaaatcccagggctgactcgctgcagttggcccagcttgggtcacatgcctttgcctcaactaaccagtttgtgcatgatcaccaggggaatgcggtcctcatgggagtcaaggatttgcacacattcctggagtcaacagtcaaggtcagcccgtgcaacttaaataaggaagtgttggtgcccaaaggatgacagagccaggcaggtgaagcttccacctagtgctgggcacacaggaggcagtaagtgctctggcctttcagcagatgccagccctgctgcccaggggcagtcgccagccagctcattgtcaatggcctttcctggcctgccattaattcctcttaatctgcctgccaaattttcccacccccacgccagcccccagcttgcccctcctcttgtgctgtccttgcctcgaaagctcagcgaatccaagcttcccaggcaccagccacctgccacaatttgggctgggcttttaatcttggttttaattccagctcattctcttggctgtatctcccagcccaggagccccggggcccatgctaatttgcttctcccacctccactggtgccggaataaccatttttaaaagtgccttggggaaatataatcaaatgagagcaaaatctaatttggcactaaaagcctctgactgaagccctgttttctagggcctggtggagactgaataatacaccctttttgggtttttaagggttgggggttggagaaaggaaagagacgtgaaaggggagatgctagcagaggaaacagcttgcattaagctgacatccgtggcactgaaaagaatgggcaggaggaggacccccacccactccctatgaagaaattcatatcccagcagccaagccaagaagctaaactccagcattcatcagaaagaccttggcccaagtcttcaagaaccagtaggttcactggctggagatttggaagatgtgggagtgtagcgggaaacccagttccccagtggggagttcagtgaagcctttttctctgactttcagttcacttttctgcaaactgagggggtgaaaatctgtgcttcttaaatgacttgtgatctgggctcctttcagaatgtgtcaaaagctgtggacttgtttccaggaaaatgcacaaaaggcaaaatctggcatgcaatgttccaggagcggtacgaaccctgccactcctcatgacagtctccaggaccctatgggatctgtcccctcttccccgtgatgtcatttcctccctccctcactgtcccccttgggttctgcgatgcccccacgtttgtactggcttcagggactttgtacctgccaattccctctgcctggaacagttttcctcctatcccctctgactcttgctcttcagcccagcgaggcctctcacagcactgcgtggggccactctgtcctatcattctcctttattttcttcatcgcatttgtcatcattccccactagaacatcaactgcacgagggcagaagggatcctggtggtcttgttcactcctgtgattccagtgcctgggaagctccctgcataccgtaggtgtttaatcaacacttgccgaatggatacaggcatgcataccttccctagggcagtgggaccccaaattcagcaatttcgagtgccaccatcatgaggtgtaccatgcccaggtacactgattctgttaacattttaccctagattgtttcactctggacttcagttgtttcaaaaggaatcttttacatcactgacagtattgtttgccacgagtagaaagtgtcggggctctgtaggggtgtaacaaaaacgcaggtaataagagcgagatctggtataaagaaagtgattttttattccaaagctagcttaggggaagaagtacagtcttcctgccttaagggtactgctttgcttttaggagcagaaaggagttgctttttaaaagggggcctggcatgaatggcacacaggggaggaattgagtgctgggggggtccgcatatctcactcgagtacttcatctaccgggaagtcagctggcagccactggtgcctttgtgggtggaactaggttgtaagggtggccagaagctctccacctgggagggagtttcgcagcaggcatactttgggttgtagtggaccattgtctctcgaggcaacctcccagtgagtgagagttccgctccagagcctctaagcacgtgattagatgaacttgccctgaagagagtgtctggtgtaggggagataaaaggttataattgcatttctaaagggcgaagtggggcacggggaaaatggagaaaaaagaagaataaaaaataataaaactgccggacagggtggctcacacctgtaatcccagcactttgggaggctgagatgggtggatcacctgaggtcaggagttaaagaccaccttggccaacatggtgaaaccctatctctactaaaaatacaaaaattagccaggtgtggtggccatgcctgtaatcccagctactcaggaggctgaggcacaagaattacttgaacctgggaggcagaggttgcagtgagctgagattacaccactgccctccagactgggtgacaagagcaagactccatctcaaaaaataataataataataataaaactcatctttttcttagaaaaaatgggaataccgatttatgtgggggcttattaaattttaccctcttccttgttgaggtcctgagccgattaagaaatcagacccaagagtcagctgatgaaagtcaacactgcactctgatgaatctggtgaaggctgggtttgagggcatggcttccttctgagagcatttgggcttcctgactaaactccagagtgtgacagacttcccactgatgcaggtccacacctctcctccccgcgcagacaggacaagcctcctgaaaactagccctccccgggggcagctcagtccccagaggaaaagcaagggaagggattgggctatgcatgcccacttcggcccttcaaatccactaggcacatgctaggggtcagcaaaccacagccaatggacctaaccaggccctccatttgttttagtaaataaagttttattggaacatacccgcccacttgtttatgtcttgtctgtgacttcttttttttctttctaacaatagggtttagcagttgtcacagagaccctttgaccctctggcccacaaagcctaaaatactgactatctggcttttacaggaaaggtttggtgacctctgctgtatattgtccccctcggaggaggtacgggagagcatggagagaggccaggagtgttacagaagtggagcccccccgcatggagggcagcgttagaggtgggggtcaaggtcacaaggtttaggaaatcttgtttcctgaactacacttggtctccaggggccttcctggctctcacaatatggctccaaagacctgaggggtgagatgctggagggttggaccataggcaggtttatttaaataagatagggtttctcagcgacgtatggtggctcacatctgtagtcccagaactttgggaggccgaggcaggtggatcacttgaggtcaggagttcgagaccagcctggccaacatgatgaaacctcatctctactaaaaatacaaaaattagccgggcatcatggtgcacgcttgtagtcccagctactcgggatgctgaggcaggagaatcccttggacccaggaggcaaaggttgctgtgaggcgacatcacgccattgcactccagcctggaaaacagcgagaccctctctcaaaaaaaaaaaaaagaaaagaaaagaaaaggtttcttggattaggcgctgctgacattttgtcctggctcagtctttgtagcgtgggggctgtcacgtgcgtcggcgaatattgagcagcatccttggcctccacccaccagatatcaacagcacaccaagttgtgatgaaaccaaaaatgtctccagacattgccaagtgtctcctggggacagaaattaccccctttctggccaagagccactgctttgaggagctggatgcattgaggcatctccaacattccaggtcccagagaaagagaagtgcaggcctttagcttgcccgggaatctcatgctgcctccactccatcagttactccctgacacctagccagggacgcccagtcgctgtttaattaggcacccaccacctaattacatttcactctgtgaaaactggatatgactcagactcagagactgcagccggttccccgcctcctcctctgcagaacgccaggttcttcccgtttatttttgctccatcctcccacacaaagggaggttccatcccggaccttacccctgaggctgctgggggatcctcccttcctattttcacctcccctgtgtacccagacccttacaggaggtgtttcatcagctcctccctctggagcggtcacctcccggccctgcatgatgggcaagtcatttaatgaagtgctcccctttgccttgtattttgggggtttcagaatccagccgcttgggttcctaaggggttttcccactcctggaaagtgtcagccatctgccaggtcaccaggaaaaccgctgcagagggagccagctccatcacagctcccccagggccaggtggctctgtgctttctccaaggacactggtggataggttgtcctctcctctaggggcaccagagccccatcccacccactctcctccttcctctgggggttcacctccctggcctttctctcttcatcctggcttctcggccaagcactcacgtgcacaaggcccagcgctgagctgtctgttagcaagatctccttacatccctacaacctcctggaacgctcatattctgtgctctcagcaatactcgtcagaaatttcagaaccgcagtgtcctcatctagaaagagacgactagaataggattgctgtctctagactcaaattttcccatttcttaaatatggctttatagattataattattaaaaattatacatgcaagccagacacggtggctctcgcctgtcatctcagcaccttgggaggctgaggcaggcagatcgcttgagctcaggagttcaagaacagcctgtgcagcatggcgagaccccttctctacaaaaactacaaaaataagccaggcatggtggcatgcgcctgtagtcccagctactcgggaggatgaggtgggaggatcacttgagcctgggaggttgaggctgcagtgagccgtgatggtgccactacactccagcctgggtggcagagtgtgacgtgtctcaaagaaaaaaaaaatgtacatgcaaaataaaaacagaagaggatcatgaagaggtcttgtctgtctccttatcacagagcttttaggcacatccccttcctgatgaattagggtgattttctttaagctttgttgttgatgtaaagcgtgcatgtggaaaagtgcatggctcccaaatctccaggccaatgaggtgtcaccaactgaaccacctgctccagcaagaaatagaacaagatcatcacccgagaaactccccttgctgctcccagccaccctcccccagtctccaggatacccactgtttttattctaacatcatagattagtttggcctgttctcaaatttcacatagatgacgtcatatggcatgtattcttttgtatctggtttatctctcttaacattcttaggttgttgagatgcatccctgttcttgaatgtagcactaggtctttcgttcaagtttcaatgtagccttccgttctgtaaatatgcaacaatttctttacccatccttttgttgataaacatttcatttgtttctacctatttactattacaaatgtgctgtcatgtcttgtacctgagtttaggtgagtgtatgaatacttttctgttgggtaaatacccaagatttaaattgttgggtagaagttaccaatgcattcaaatttagcagacacagccaaagagttccccaccgtggttggaccggttggggcagccactcagtgtgtgagggctcaagttgtcccacatccccacccatactaggtgttgcccatttctttaatgttagccattctggttgctgtatagcagacagaatccaagggatccacaaacttcaatgggaaaaaaagtgacactctggttttcactaacctacagctgagacttagcatttgcttccaatatgagcataagccataaaccacagtatgttggcagaatctgtagctttgtcatctgtagaaatcaccagtatttaatatcccattgcagtttttgcagatactgcaaaatataatattttcactcataactattctgaaatgatcgctctctacaaggttttaaaagacacagtaggccaggtatggtggctcacgcctgtaatcccaacactttggtcaggagttcaagaccagcccggccaacatggtgaaaccctgtctctactaaaaatacaaaaaattagccaggcatggtggcagacgcctgtaatcccagctgaggattactcgggaggctgaggcaggagaattgcttgaaacctgggaggcagaggttgcaatgagccaagatcgtaccattgcactccagcctgggtaacagagcaagactccatctcaaaaataaaaaataaaagacacactgtatcgcaaatgtgtttagtattttgataaccgtatttccaaacaattgattttctctgtaatcctatatcttgtattcaatgcacgtaataacattggagaagggatccattgctctgtgtgccagagggctccatggcagagcaggtgtgcatgctcaggcctcggacacacaatagtttaataaacatcgtcaggcactttctcacgtggcctcctgatccatctccctccgcagctttcttcgggaagtatcttaatgaatacaacggctcctacgtgccacccggctggaaggagtgggtcggactccttaaaaactcccgcttttataactacacgctgtgtcggaacggggtgaaagagaagcacggctccgactactccaaggtaagctgcaacctttccagcctgggagtggctgtgtggcccagcagttagaggcccaactcaggagccagactacttgggttcagattgtgactcaggcacttaaaagtgtgaccttgagcattttacatacacctcctcctcagtttttcatctctcagccagggacagtggctcacgcctgtaatcccagcactttgggaggctaaggcaggtgaatcacttgagtccaggagttcaagaccagcctgggcaacatgacgagaccctgtctgtacgaaaaaaatacaaaacttagccgggtgtggtggcacatgcctgtggacccagctactagagaggctgaaatgggaggattgcttaagcccgggagtttgaggctgcagtgagccaggatcttcccactgctcttcggcctaggtgacggagcaagactctgtctttaaaaaagaaaagaaaaatgtattcatttctcaaaaaatagtgtctgtttccaagagtttggttttttaacattttgccgagacagaatattcttacagaaagtacatacacagagtgtaccattcaaaggcttgccgcacactgaacggacatgtgtaatgagcacccgggtaggccaagaagagaatgtcaccaccgcccgcagcagtcccctcacggaattcccccgactcgacacccctcccgcgaggataacgatgattcagactcttagcgttacagattcactctgcatctggcttctcctgcttagtattatgttgagttcattcttgctgcccagcattccatcatgcgcttataccacaatttgtttatttcttctacttttattgggcatttaggtatttccagtttggggttattacaaatagcgctgctgagcactgtctagaacctagctcctggtgagcatagaggctcatttctgttatacccgttcctcacagcagcgttgctgagcacagggcgtgtgcatgttcggagtgagtgggtgctgcctgagcacctgcagcagtggttgatcctcagtcgtagttttttctgtttttaacataagatgaattgacatgaggtaacatgcacagatcttaagtggaccgctggatgaattttcacatacgtgtgcatctgtttcaccgcgcatctcttccacatatgcgtgcatccatttcaccgcggctccgatcaagacatagagcacttccagaagactccctgagacccctctccagtcatgaccccccaccctggggatgacgtctactctgacttctgacagcgtggattatttttgcctattctagaacttcacctaaatggaatcgtatagtctgttctcttctgcatctgccttttttcacccagcgcaatgtctgtgagatctgtattatttattcattcaacaactcatggacattttggttgtctccagtttgggtctattataaactaagctgccgtgaacatctttgtccatggcttttagtggacatatgcacccatttcttttggttatacacccaaagaaggattgctgggacataggatgtgttaagatgttgcgcccggccaggcgcagtggctcacacctgtaatcccagtactttgggagactgaggcgggtggatcactttaggtcaggagttcgaggccagcctggccaacatggtgaaaccccgtctccactaagaatacaaaaattagccctgcgtggtggcgggcgcctgtaatcccagttactcgggaggctgaggcaggagaatggtgtgaacccgggaggcagaggttgcagtgagccgagatcacatcactgctctccagcctgggagacagagcgagactccatctcaaaaaagaaaaaaaaaaaaaaaaaaagatgttgcaccagtttacactccagccggaaatgggagttgccctgcatcccttatcagcacttggtgttgtcttttttgtcagggctgctttgttgggcatgtagcggtgtttcattatggttttaccacaaaggtttttgaggatcacgtgagttagtacatgtagaacattagaagcgccccttgcacgtagtaaatactcagtatgtagtagcttagatcagggcaacaaatattttctgtaaagggccagatactaaatattttaggctttacaaggcttacagtcctgttaccactgcagaagtctgccgttatagtgtgaaagcagccatagataatatacaaacaagcatggccatgctctaaggaagctttgtttacaaaaacaggcagtcgacctgcttggctgtagtttgctgacccctggcttagatgatgaggaggagaaggaggagaggctgacagtgatgtttcatccagatgtcccattttaaaagaaatatggaaatgaacaaatcttcctgccccatctgaatcctcagagtcagctctgacatccccccacagctggtacattctttccccagaccagctgccaaatccatccctctttctcttttcccatccccactgccaccagtcctgggccctgcctactgtgacttcccaggttaaagtcactagagaacaggcagtcactgaaagagggtagcaagccaggagtgtgtggacaatagggagtggtggagacggtggagaaggtgtctgtccaaaaggggcagatcaggcccaggtagaactgtgggcccagatggccacttttcctgatttttcaacagaagccacaaatttgtattttttacctatgaaatctcctgattggtaaatattggcaactaattcagacttttctaaaatcttgcatcaattgagcatgcctgacccatgggcctgcagcccttcagcccaccatgtcgttcttctgccagcaccctccggggactgtacggtgagtttcacatttggagtcagtgggatcaagttgagagccccaaccttgacacatattacgtgaccttggacatgctacgtactcctaagagcctcaactcccaaatctgaaaaacaagcatacccttgcatacttaatcatgtgtacttccatttactgagcacctactgtgtacccctgagcacctactatgtagtgctcaggggtacacagtagtacttctgataacatgtagtacttctgatattcacaacaatcatatgaggggagtggactagtcacatttggttccattattcattcaccacccccaacaagtattcattgagagcctgctgtgtaccaggtaccatgccaagtgctggctattccaaggtgaatgaaaacagatgacccaatcatggtcctcctggagctcacagtctggcacatgaagatatgatataaactgttaagtgatgtgcacacatcattaatgcacacacacacagtcacatcacacccgtctattttgtcatccccagtatgagccatttcaacctccaagcttgctagttattacagtcatctcagttttgttttgttttttgagacagagttttgtgcttgttgcccagactggagtgcaatggtatgatcttggcttaccacaacctctgtctcctgggttcatgtgattctcctgcctcagcctcctgagtagctgggattacaggcatgcaccaccacgcccagctaattttgtatttttagtagagatggggtttctccgtgttggtcaggctggtctcgaactcccaatctcaggtgatccacccacctcagcctcccaaagtgctgggattacaggtgtgagccatggcacccagccactatagggtaattttttttaatcagactaggctcttgaagttgtttgtgaacagaaatttaactcccagtggcttaatcaaagaggaaatatattcacctatttaactgaaaaccagctataggggtatcaggcatgggtggatccaggagttcaaatgaacccccaaggagttgatttctctctactgtcagctctgtttttgtctgctcgactgtattcacagaagctctctctcctcctggtagcagtgcggccttccttatatcctcccagcttcctggccagctgcaagcatgggagtctctttcccaggagtcccagagagtctcagtgcatctcattggctctggatcagtcccatgtctgtccctgagccaatcagagtggccaggaggatgcctggttccctggactataagtcacatgctccactcctgagccagacatgggggtagcaggagctctacgctggaacgttggctgggaatagagccccaaataagaatggagtttccaccaggagaaggctgactaggtgctcaacggccaaaaaacactctgtcccacttctgttctggaaaccccggcacacatggagatccctctgcctccgacaggtcatcctgggctccctgtaagtctgatgggtccaggcccaagtggcagaagccgcccccggcctgccctcaagtctcattctgcacatagtaggcctccagcctcccaagtgaattaattccaaagttctgatgaggcagtccggcatggactccttggaatataaattccagtcccagggctaagcacgctgtttccctcctcccagcctcagtgcaggcggattctctaaatatcctgaaaaatacattccctcctttttaaaattcttcaccacatccacgcctcatctcagagcagcccgataatcaagttatcccggggtgctcaggattcttttggggctaagcatggggacatagaacgtccgtccttttgccctgtttcctgcccacacacatctccccctgtgaatgagaacagccctgtgagggaggcgtgagaggattcctggccccccagttaccaggggcctgggaacagagatgctctaacagggacgtgggcagagggcggggcggtgaagtcagaactggctcaggtccagggttcaaatcctgagggtagcagtgggcagcaggagcccaagcgtcaagggaacaggggtgagcccggggtttccagccaaggcagagctcaggagccctgtgccctgggccctagatcaggcagtaagatgcctctggcaaggcagaatgtcactgctggcctcgggcgggccttgttgggaggcccaggcagggaggaagcggcaacccttcgtaagcccccctcagaaggcctctgaggactctgtcccaagtcactaatccacagatgggcacatgccaccaaaggggtccagatgtcaagggcagaaagagaggcagtggtgatgagaaaagagtgatacaggacaagcgctaatggcagaagagggttggagaggggaagacagttgttagtgggaagggaagtgagaatgacctagagttgagtccacccgaaaagaggcttccaggtagctggcaaaagtgggcctgggtgttgggtggctmtgcagggaggtgatggcagtgcwcggccagtgtgggggcgacctggcagattctatgaacttcatgtgccccgccccttgccgcagcgtgtacacttctctgtctatctggagaagcctcagtcataggcaggagacggcgtgatggagcagctggttgtagctctgtttattactgaaagaaattagcaaagtccaccaatacacgaaataactaaatgaccgtgaagcatccctcctctggaagatcctcggcaaaggatgaggccggtctgccttatgtcctgagcccatcaggcagagtgggaaaagcaagttccagaactcctgaggtccttattcaaatgtcacctcactttagccttcctggaccaccttgtataagggcacccccaccacactccttactgcaacaaatcaccatctggtgcattacaccctgtgtatattactgattcatttgttaagtatctgtctcttctcataagaatataagccccatgaaggcaggaatgctcatttgttttgttcactgctgtatttgtcagatagataaatgaatatgtacagtatgatgtgattaataatataaaaagatgcataaagtgatactataatgtacctaacaaaacactggaaaggttattcccagtaggggacagaagagccaaggttatgggggtgggggggtggtaaggagtaatctaatcaaatgagacttcactgtcctttgtactattttaattttcacaaagaaaatgtaggcatatggttcttgaggaataatgactaacactcatttagacataccatgtaccagatactgtttgaatcattttacacaaattaacccatgcatttctcatcatagtctgtgaggtatatactgtgtctattcccaactgtcagatgagaaaactgaggcccagagaggctaagtaatgtaaccgggccacatagcctagtaagtgataaagcagaattcgaacccaggccatctggcttcaaagtccatgcactaaaccacagcccgtgggcccagactggtggtttttgtatggcccctgagctaagaatggtttttacattttcaactaattgaagaaacaatcaaaagaagagcatttttcacatggtatatacaaaaatgaatgtcattcagcctttaaaaaggaaatccggccaggcgcagtggttcatgcctgtaatcccagcactttgggaggccaaaccaggcggatcacttgaggccaggagttcgagaccagcctggccaacatggggaaaccccatctctactaaaaatacaaaaattagctggacatggtggcacatgcctgtagtccagctacttgggaggctgaggcaggagaatcgcttgaacccaggaggcagaggctgcagtgagcccaggtagcaccactgcactccagcctggccgacagagcgagactctgtctcaaaataataaaataaggaaatcctatcatatgcagcaacatggatgaaccttgagaacattatgctaagtgaaataaaccagacacagaaggacaaatactgcatgattcccttacatgaggcatctaaattagtcagacaatagcagcaaaaaggagaatggtggttggcagggctgaggggagggggaactggggagttcctgttcaagatgtatgaggtttcagttatgcaagatgaaacagttccagagatctgctgtacaacatggtgcttagagttaacagtactctacttcacagataaaactttgttaaaaagcatacagctcattttttttttaccacaataaagcttttaagagtaattttcatgacatgtgaaaaatacatgaaattaaaactgcatccatacataaagctttactggagcacggacatgcccattcattttcctgatagctgctttcaagctgcaatggcagtaatgagtagttgcaacagagacagggggcctgcagagtctaaaatatttactgtctggccctttacaggaacggtttgtgcatacttgctctaaaccactatgtatgcttctcattaataatgttatctgtggcggggagaaaaagatggacctgacccaaaaatacaaaggccttggctccagctctggatgcatggcttatttgtttggggacctcacttccttatctgtaaaatgggtataatgtccacttgtcaaagttgctgtgacgatcagctgagctaaggtatttgataacatgaagagcctatgatcattcattacgagttgtctggagcctgtggagctgctgccacccacacgcactgccttggccttggagggaagcccggtgcggagtgcccactcgagggaaacacgcttttgcctagggctgaggctggcagtctccgcagacactagctactcagtcggtgaagcttgtggatgcctgcaggaatcacctgaggctcagagggtgcttgccagagggggccggttgcacctcggggtcccagctgtggcttctcagccctgtggagctgtgcaggccagcagcacctgggtagagcctgactcctgggcgccgggttctggaaaatgcacctgggcctgtggacctccacccatctcaccctcctgctcacaggtctgaatttcagagttcttcctcatggcttgacccgggcaccccaaacacagtttgcccatctctgaactcagcctttcccccggcccaggccttctctacccttccctcaactgcccaaaccagagaccaacaggggtgggggtcacccgcccctcccgcaccccacatccacccagtggctgtcctggctgcccctgagcatcgctggatgctgcccccgccaccctggcccaggcctcctgttctctccctcagagagaacagggcatggctgaagccctgtggccggagggatgggtggctcttgttggctggcctggcactaactgcccactggtggagcagggtggcagctttggaggcaggtgtgtcatgtggcattgcggagctagcagagatcggggaagacttagccgaggagtggccactgaggaggatggataaggaggggagctctcagacatggagaaatctgcccagccaccaagacagtcctgattcttagctgaatggtggcagagagctggctgtgcacaggacactatggcaagagcttcacatctattggtgctttaacctgcctgtcagcctcaagaggcaggtactgtaatcaccccccacacactttgaaacattagactgtgggagcccctgacccaccctcctgggtctcattcctgccccggcctgagccctcccctggaggtagccagtatcctggagcttctacccacacatacctttattctttcatcccataggtggatatctcaaacaatgtacgatgctgtgtttgtgtccttagactttttataaatgatatcatatcatacacatccttccacaacctgcttttctcacccgatataacattgtaagatttatccacgtttgatccgtgttcatccacgtagctctgttctttttcactgctttagaatcccattgtatatcttctcctaggaatggaggttaatggtagctttatttttaaaaaagtttaaccacggccaaacaggcatatagttctaagatgaagtagtgaagatgagtctgttatgaagagcaacggtggcttcccaccccaccccactggcgggtggcagcaagtgtccaccactggcggttccatctcattctcatgccatttcctgacttgaccccttcaggccctgactgttgatgtcagggtacagagctttgcaccatttttagatccattgtaaattacctttgtcattttaagaacttttctaatacctttatatcacgttccaaaactatagcagcagctctttgatttatataacatatattatttttatgtaataaattctgtagagcccccttataaaattgtttttactccccaaaattaatccataaataatattcaaggagcaatatataaagaagcaagtaactttctccgcttctctcctcttcccagtcttcaatcagcattttgatatccttccagatttttccttgatgctcaaaaatatatgaggttagagtttggtttctcctcttcaccttcccttccctctgcccccacaaaaaatagaatgtttctgagtttgactctgttgcttgctcttacccttaaccatgtatcttggacaactttacacatgcctttttaatgtctgcacagcattgcatagtatggaagcaatgccaccaggtgtgttggctcatgccttaatacctacactttgggaggctgaggcaggaggattgcttgagaccaggagttgaagatcagcctgggcggccacttgctagctgtatctacttgggctaaccactgttagatactcaagactctgtctgtagagaccctgtctctacaaaataagaataaaaatgaaaaattagctgggtgtggtggcacatgcctatagtcctagctacttagaaggctgaggcaggaggatcacttgagctgaggacctcagggttacactgagctatgattgtgccactgcaccccagcctgacagagcaagaccttgtctctaatatgtatgtgtgtgtataatatatatacatgcatactgttaaacatatatcctcctgctggtcactgcaatgtttttgttttataaacaatattgcagtggccattcttgtgcatatggatatagtggatgagtgtacctgaaagagtgtctgtagatatatgaatacatcatggtatgtatatatgttgtatacttcagggtggaagctgtagacacctcttcacctttttttcttgaaaataatcactttttgaaagtaattgttttgggcagagctgctttctagcagagggtatatttcaagaagtcattaccttgaagaaagattagcagctaaatatttactaaattcaggaagagttgtatgggtgctgtggctcacgcctgtaatcccagcactttgggaggccaaggtgggaggatcacttgagcctgggagatggaggctgcagtgagccatgatttcaccactgcactccagtctaggcaatggagcaagaccattgctccattttttgctccatgaccaaaaaaaaattaaagagtataggcaaacctcaacttcttagctgagcttttaaagcctccagttctggccatttacttttcctccaactcttctctcctcttgcccaatatgtaagtcagttccttattttcctggagacattactgcatccccatcccttttttgtgtgtgtgctgctccttatatcatttctgcattttaccctctgacattttatcctctttccaaggagccagttgccatctgccctctcttctatttttagagcacatggcaagcacattcctgcctcagaccccgttatctctgcctggaactctttcctggatcagtgattctcaatcctgagtacccattagaatcccctggggagttttttaaaagtctgatacctgggccaaaccgcaggccaatccaaccagaatctctgggggtgggcccaggtatcagtaagctctccaggggattctggcaaaatccagtgatacatatcttcctatgcccagctccttctcatcattcaggtctcaactcaaatgtcacctcctcagagaggacctccctgactgccccagctaaaatatgcccctcacctcagctcccagttactctttgttacatctctctgttttatgatatttccttcatctgtcataacttttaactaccttggttctttatttatacatgtgtctgctcctgccccagtgtaggcaccccagggacttagggatatacccaccctgcatgacagtgtccccagagccttgaaaaaacttcagacttaggagccaagactatgtagtgctgggtccaacatttactagctgtgtgccattgggcaatttacttagcttctctgtgccttaatttcctgttctggaaaataaggattatcatcatacgtactttctatagttatgtcagaattaagcgagcaaatacaggtaaacacagaacagtccttggcacatcgtaagcactcaatagtgttagctattattcttttaatatctttttttttttttttgagtcagagtcttgctttgtcacccaggctggagtgcaatcatgcagtcgtggctcactgcagcctccacctcctgtgttcaagcgattctcctgcctcagccttctgagtagctgggctacaggtgtttaccaccacgcctggctaatttttgtatttttagtagagatggtgtttcaccgtgttggccaggctggtctcaaactgacctcaggtgatctgctcacctcagcctcccaaagtgctgggatcacaggtgtgagccatcccacccagcctattttaatatctatctaaagtgatctattgcaattcctgccctgttctccctatccacttctctgctttatgtccaattagcttagcaccatttgcatcatttgtctggcatttcatttattttacttgcttatttcttgtctgtctgctccctagactgtcagctccagaagggcagaaattgttttgttcactattgtgtccccagtgcctagcagggtgcctggcacgtagtggacaccagtatgaatacctggctcctcacctgttctcctgtctctccccaccccccaggattacctcacagacctcatcaccaatgacagcgtgagcttcttccgcacgtccaagaagatgtacccgcacaggccagtcctcatggtcatcagccatgcagccccccacggccctgaggattcagccccacaatattcacgcctcttcccaaacgcatctcagcacatgtaagcctcagcactctgcctgccagaggcactgcttagcatgaagggggagggtcaggctttagcaacagtactgtcaccaccatgacttcactgtgcctcctctctaatcctcctggtttaaagaccccaagaacatactgcttgtccatggtgaaactgggatgcaactccagacagcctgggcaacagaccaaggcaggagaatttttaacttgggatacacggcctcccaccaagaggtgtgtggatggaactgcatagaataggtttccttttaatgccatgtgtattttatttaagacatctaaaaacattcttttgaggagggggtctatagttttaccagactaattatttgccaccatttattgagctgtgggctatgtagcaggtgctgtgctaagcccttggcattattgtccagtccctgaatattcacagtgacccttggtgtaccagttatctattgccatgtaacaaatcatcccagaatctagcaacttaaaacaacaaacacaaattatctcacggtgtctgtgagtcaggaatctgggagtggctgttctgagcttctggcccagggtctcctgaggttgcaatcaaggtgtcagctggggctgcagtcacctgaggcttgactggggctcagtcccatggctgggtcttgccacaggagcctctgtccatagggtgtttgagtgtcctcacagcatgatagctggcctcacccagagcaaatgatcagagagagagtaaggccaagaaggaagccacagtgtcttttacaacctaatctcggaagtggcaccatcactgtgccacattctattggtcacacagaccggtccttctacaatgtggagggtctacgcaggggtgtgaaggccaggaagtagagattatcaaggkccatcttggaggctgcctgtcacacttggtattcccattttacagatgaagaaactgaggcacagagaggtaaggtaacttacctgaggtcacccagctctaagtggcagagccaggattcaagtccagccccccacttctgcttcccatgcctctgcccacccctgtagtactctatccagctggctgggaaacttcctggaaagttctcctgcttctctctgcctcagaccaccccctgcttagcagtgactcagcagcccttactgtgacattctggggctgcaaggatggggtggtttggaatctgcctgaatattcagggtgtttggcttcattacaatctgaatacattgccctcctcaagcccctcctgtaattactttttgacagacctcgaagcagctcagagagggtaccgaaggcactgttcaccttcccatcccctgatctctggggaggaggctttgacagaagacgatgagctgcgtcccaggggctgcagcattgctgctgtgcacatctgtctggctccccctccaaacccaagcccactcctctccacccaagaaggccagcctcccccagcagccggcaccccgccctaccgccacttagaactcatccctgcagcgggtggaggccactcagccctgtctaagggagaagccgtgggtgagggaagggacgctttgcttcggcagcatctctaaaagaggtgccggcttcaccccaaacagcagcgagcggtgccggaatttcatgatgaaattgtttggcattgcctgctggtttattttccctttgaaatgaaaattacagaaattgaaaatgagcagtgtctgctcttatgtggagaagccccctttgccttcttaggggcatgtttggaaggctgtctcatctctggagtataatcatttccgaaagaaaccaaaaaagagaaagtcctgcagctaggatgttaaatgatgacagtcaagaaggggtggagaggggacagagccggggcgcacggttagagcactggatctttctgttaggggtctcctatcccatctctcccctagaaagccggcacatgccctttcctggggcaggccttgtgtactctggcaaaagttggtagatggtggtaccatccaccccgcagaccccagggccctgcaccctccccatgcacccccccacacacacagtcacatacatacagacacacacaaagacatgcaaatacacacaggcacacaaagacataccacacaagcagatacacacaatgaaacacacacaagcctgggcaacttagtgagactctgtctctacagaaaatttaaaatcagccaggggtggtggtgcacacctgtagtcccagttactggaaaggctgaagcagaaggatcacttgggcccaagaggtcgaggctgcagtgagctatgattgcgccactacactccagcctgagtgacagagtgagaccctgtctcgaaaaaaaaaaacacacacatgcagacacacaaaaatacacagttacagacacacacaaagacatacacacacgcaaacaaagacataggcagagatacaaagatacacacaggcgtgcccacagacacagcccaccagccctcagagcttcccttcaaagggcgctgattgtggcttcaagggctttggggcgagggatgttggggctgctgctgatggccccagacacacagtggaggggctgtgaggacaccaccatcttcccgccatttccccagcagaagggaagggggatggtcttcttcacgcccttttgtgaacgcaccagatattcctcggatgctggaggaggtgaagttttcagatgtttgttgaacaggcagctgggcccatgggaagatgccgacatcctccctgggggagcctggcttgacacaggcaaccagcaagctggcgtcgaccccaagcaccacccggctctgctgccttctggcctcagtgtccttctccaaaagcgctctctccgagccggggctgcagaaatcatcatcctctgaacagtcacccctcactgttctcgagggccgatgtcagcctaacttctcatggattcagggatgattgctgaaaattgcatcctggaatccgggcccttgggcctgcgggaccaattttcccacacgctcgctgctctgagagcgtctctgtccgactgctgcccccagcagccccctttcagttcctcggtgggagagatctgagaggggagctgagcttgttcctgggaatgttctacatggcgggtcaggccctgagacagcagagccagcccacaggagagcctggccgttctgtaatgaaaggaagcatgggccctgatggattcagtggcatgaggctgcagatcagccaggggctgagaaagccgagtccaggggagccttggagacagtgactcacctcccgccttacatagcaacggtgtccacagctgccaagctaccccagcggcagcgtcacaatttctgccccggacgattgtgatatctgagacgctgctgaagtcccgacgtaccaggccagagggagacatgtctgtgcccctctgaccaggcttgtttttcctcctcttcttcgcgggagctccttgcccccagaacacccactgtgaaaagcagtggaaactcaccctttacttcagccttgactgggaagagaggccagatttgcagggaacctggccttcaagaaccatcaggcccagggcgaggaagcccacgttttgtgaggccttaaacagtgcctcctgtcaatggtgcaccccacccaggagactcccccatgctgcggttttcagtagctcggagccaggggcccggcataaactgaggtgacaaggaggtgctcttggtttgctcacaatgtttcctctggttttggtttaatctcccattgactaaccaggaaatagagaggatcagagaagtttggggacctgcccgctgtctcacggagtgagtgacagacccagtgtacctgacttctgccgtggagtcacccgtgattactaatgacaaagggacacaccaatgataacctctcccaagcagtcatcacgcactggccatggttagaagggttccccttacagcctctccctcagtgctcacaaccttcctgggaactggcactgtctgtattctccttgggtaggaaatgagggaactgatgccttgggaggggactaactggccaaagacagaactggggctcgaaccccagcagctggtatagtcaaccactgccatgatatcatcatagatacctgcttggggtccctccatccctcacatcacaggtgctcagacagaactttgcccaacacactcctgctgcacgattaagcagcatgccaggtgcagtggctcatgcttgtaatgccaaaactttgggaggccaaggtgggtggatcacctgaggtcaggagttcaagaccagcctggccaacatggcaaaaccccatctctactaaaactacaagaattagccaggtgtgttgacacaagcccgtagtcccagctactaaagaggctgaggcaggagaatcacttgaacccaggaggcaaaggctgcagtgagctgagatcccaccactgcactccagcctggaccacagcaagactccatctcaaaacaaagaggccaggtgcagtggctcatgcctgtaatcccaacactttgggaggccaaggtgggcagatgacgaggtcaggagatcgagaccatcctggctaacatggtgaaaccccatttctactaaaaatacaaaaaaattagccaggtgtggtggcacgcgcctgtagtcccagctacttgggaggctgaggcgggagaatcactcatactgggaggtggaggttgcagtgagctgagattgcgcccctgcactccagcctgagcgacagagcgagactgtctcaaaaaataaaaaagaatgtggcatgtcccaaatgtgcacattcaggtgccttcctcacaattctggccttacacataaaactatgacttatttcatttttaaatccatttctattatttcaaactaaaatctattgcaaaaggatattccgtggtcctaccttaaccacaataactgccacctgccattcaccaaaggtaactgccatctaccaataataggtacaaggcacacaaagcaatgctatggaatttgagttgggtactggttcccgatgaaggctctgaacttgactttcttcccttttttcaaaaggaagacgagcaaagtctagagaggtgttaaagaaacactagcaccaaacagactttgccctgagagagccgacaagggactggctgtctcactttgtcactcaaggtcactgaatgctgtgcctcttaggagcttcccaagtgcacacttcacacgtggagaaacgctgaaacagggtttggataagcccctgacatgccaatgtcccctttcccaccaggagatcacacctggccctgggctgcagacacagcacagggtggctgctcatccgggcgggtctggcgggggccaggcagggtccaggctgtccctgggtttgaccgatgtgtatgtccttgcccaccagcacgccgagctacaactacgcgcccaacccggacaaacactggatcatgcgctacacggggcccatgaagcccatccacatggaattcaccaacatgctccagcggaagcgcttgcagaccctcatgtcggtggacgactccatggagacggtaggcgcccgctgcatgcctcttggtgggcgtggctccgaacccccagccaggccagggccgagacctcctggcccttcagggttttcctggaggaatagaaatcaaaggcrgaatgaagaggccccatgtgctagacctggggaacagcttggagcaatccagacaaaagcctcttccttcatgaaacattttctagatctgtgttgcccaatacggtaaccatatatgctagttatattttttcctgctatttacatttttgaacacatttattgggatgtaattcacataccatacaattcccccaattaaagtgtgcaattctgtggttttaatatgcccagagttgtataaccatcaccacatccatgttaggacatttttcttaccccaaagagaaacctcacagcccttagatggcccactaaatctccctcacccccagccccagacaactggtgatctctttctgtctctatagatttggtgttctgcacacttcctataaatggaatcgtacacgctgtggccttctgtgcccagcgcctttctttcacttagcgccacgtgttcaagcttcacccctggtgtcgcatgaatcagtccccctcattccctgttattgctgaataatatcgcattgtatgggtattgtcacattttatttagccatggctatttaaactgaatgcagtaacattataaagtcagttcttctgtcacacaagcctcatttcacatgctcagtaggttcgtgtggctggagccaatatgtgtccatatcggacagtgcagacattaacacggccaccaatgcagaaagttctgccacacggcgcccttccagatcgcaagatcctgccataggctgcagcccaagtttcactcattcattcattcacctgacagcattattgagtgccagtgtacgtgggatacagcaggcagggaacaaaatgacaaaagtgtctgccctaatggaggcagcatgccaaggcagggacacagatgatccacagataagtaaaagagatggatgccaagaagggccatgaagaaccgtggaggggagggcgggccaggggtgacaagaggcaggaaggtgcagtgacaaaggggacagcccctgggaaagttgagcaaagacctgaagcaggggagggacggggcctgagatctcaagcgcctgtcaccccgggtcggagacgggccaggcacccagtccccactgtcccttgcctcctcgcccgtgttgcagatttacaacatgctggttgagacgggcgagctggacaacacgtacatcgtatacaccgccgaccacggttaccacatcggccagtttggcctggtgaaagggaaatccatgccatatgagtttgacatcagggtcccgttctacgtgaggggccccaacgtggaagccggctgtctgtaagtgtgtcatcccccagggacccagggaggcccctgggcccagctcagggcttcaaccatgcagcccaaacccaagcccaccctgggtggcacacagttttcgcagatgtaccccagggccagcggaaagcaattatgtcatgcatgttatatccctctgctggggaaggagaggccgggagctgttagcacctgtggaaacaggtgtggtggggccgtatgccaggaaatccagggagctgggctgtatacgtgtgtgcgcgcacatgcatgtcaccagcgggtgggaatggtgcttggatttctgttctgggctgggcagtctttgagcctggaggttgtcagggaggaaccccggaccacagcacaggcagctggttgtcagctgggatcagctgagccaactctgggcagcagcacaaagggaaatgctcttccctcccatccttcctggaggaccacgtgggccgcagccctcagccagccattctcctcgggctaacctttgagttgacatgttctggcagcgaacatgctgcgtctggggcaggggagcggacaggccactgttcccggcagcagcttccttggatcggctgggatattatggaggctggctcaaatgaggtttttgaaaagcagatgtgttgctattaagactgtcatttggtctgccttctgctcatgcccagatgtgggaacacacacccagcactcacacagggctggctgcggaattcctcctgaaaaggcgttgacagtgcagtgtggaattccagactgacatgttcccactgccttggacattttgcgagaattccaggaggcaggctgcatgagttcaaggccagagaaagtgatgactgactgttgaccttatcagatcacgcccgtctttggctcttagcgtccccattggactaagagctgtaataacgacagtccacacgtatggagtgtctactcttcagggcctggtctaagaactacataataattcattgcaagccgggccctgtggctcatgcctgtaatcccagcactttgggaggcccaggtgggcagatcatttgaggtcaggagttcaagaccagcctggccaacatggtgaaaccctgcctctactaaaaatacaaagattagctggacatggtggcgtacacctgtaatcccagcactcaggaggctgaggcaggagaatcgcttgaacctgggaggtggaggttgcagtgagccgagatcatgccactgcactcgtctgggcgacacagtgagactccatctcaaaaacaattaataattcgtttcagcatcacaactgccctgtgacgtggatgctcatagtagccccattttacacccaaggccactgaggcacggagaggttaagttgcctgagtttacagcaagtaagggaaggggctggggcttgaaaccaggcagtctctattcccatctgccacgcctctcagaaacttcaaaccatccctgtgaacagaaagaatctgacccactgagggctctacaaacactgacattgggggtttggtcagcctcggaatctgtgatctgactcatagggcccaaaaccacatcccacatggtcaagaaaaagagagtgctcatgtcaggtttgggaccaaagacacacggtatctgtcagccaggactcctttggttgcaagcagaaatgacctttgaaccagataaggcatgtaagataaaaggaacacagtaactatagttactgaaaagtccatgcacagctccagcctcaggcatggctggatccagcagtcttacaatgccattggaaagctctcatttcttatctctcagtcccacttccgccgaattggcttcattctcaggtgggtttttctccttgtggcagggtcagcagctccagattttcagccatcctgtttaggaagccaaactgctttgaacagaagacctgaggctgactcccactggcctgacttaggtcacgtgtccttccctgaaccattcactgtagccagaggtgacagaaacccttgagtaaccaggctgagtacattgggcaggggactctgaatggggccaggtagttcctacagaattagaagctgtgacacagagcaaggcattggtgctggccaggaaaagcaaccactgtcctccttcccctgagcctgggggagcgggaccactggacaagctcagccccattagctgccggttgctgggttctgcagagcgcccgtcgctcagcagtcttcccagctccctcgcctctggattcagttgtagcgcctcacgctggccttcgagccccccatgacacagccccatcttcagcagctgcacacatgcttggcagcctgcccgacgttcacagggcactggactggggagagatgaggggttaaagatgacggaaaccctaggacccaggccctgccctggtccccagggaactagcggggaaggcactcagatgctctgacgggactgtccaccattcaacaggtcctgggtcctgtgctgggcacaccccttaagtcccttaccctacattgggaatgccatcagccagaaacaagagccaggagaggtggctcatgcctgtaatcccagcactttgggaggctgaggcggatgtatcacctgaggtcaggagttcaagagtagcctggccaacatggtgaaaccccacctctactaaaagtacaaaaattatgggtgtgatggcgcatgcctgtaatcccagctactcgggaggctgaggcatgagaatcgcttgaacccaggaggtggaggttgcagtgagccaggatcatgccaccacactgcatcctgggtgacagagcaagacacctctcaaaaaaagaaacaggagccaggaaaggtggcagatgtatgggaattcacttagccaatatttactgagtagctcctctgtgttctaagggtataagtcctggagatacagaagtgaccacctgagccagccttcctgcagcttagagtctaactgggcaatagacaataagccagagaaataagtaaattatatagcatatgagatggtgataagtcttcaggagaaagataaagcagggagggtggggagggggcgcagttccgaatagggtcctcaggaggggccttgtgttgggtatctgtgctgcagaacaaactgccacaaactcagcagcttaagacaacacacatgtacaaactcacagtgtctgagggtcagaagcctgggcctagccctgcagggtcgtctgcttaggctgaaatcaaggtgccggccagggctgtggtctcatccagaggcttgactggggagcatctgcgtccctgctcatggggcaggtcaagtgcaagcagaggacttgaacccatgcagtctgcctcccagactgctcacagtctagctgctgatttagagtggcttgcttcttcaaagccagcaaggggagaaagaaaccagagccagactgctagcaggatagtagttgactatctcataacacaaccacgggagtgacagcccatcaccttcacaacccactggttggcagcaggtgcaggttggtccacacccaaggtgagggggtcacattaaggtgtgatcaccagggacagggattctggggaccactgaggcctgtcacgggcctccttggtcatagagcaaagaactaaaggggtgagggacggtggcccctgatctccagggaaaggacattccaggcagagaggatggtaaagaagaaggccctgaggctgcactgtgcctgggctgtcaaggaacagcgaggagccagtgtctgccccagaggttcaggggaagggttcaggaagggccaggatttgggctggctgtaaagggggggtcgccttcactcaggaagtggggacaggaagggcaggagggggacagggtgaggctgtcagctcacggcatgagctgagacacagaaactaagggggggcgagcacagagtgggggttcagctgaatctgggccgcagaggggagctgctgaggttgaggtgccagactgcagcttccatacctgcagatgtcagcctcccacaaactgctgcccacctaccgctccccaccccccacgcgaggctgaggcaccaccacctgagtgactgagtccccgatctcctgcctcccccaggaatccccacatcgtcctcaacattgacctggcccccaccatcctggacattgcaggcctggacatacctgcggatatggacgggaaatccatcctcaagctgctggacacggagcggccggtgaatcggtgaggacggagcagggcaggtgttgagggggccgggacattgacctgcgggaactcagagcaaaaccctgtgggtctagaacgtggggtctccaagggtcgggagctggggttctcaggtcccgccatgccaaccacttacctgctgtgggagagaagcatggtcccctctccgagattctgtcttcccatctggaatgtggccaaggtgaccagttggggaccttctctgagctaaaattacccaaagcttgaaatgatagcagcagtgatggtaggagatggtgctaactgcacggcgcttgtgtgtgaggccctattctaagtactgtgcagggaaatctaggaatttgatcctcacagtaacccagcgaggtggacattatcatcatccccattttaccagtttggaatctgaatcccaaagcgattgagtgacgtgtcggaggtatcccagcaagtctggatgtagctctgggaattcagatgctgactcaccacgccccataactttaatgctggagggtgtgatgggaacatattcctaggtgtccagagaggcagaataggaaccgtgagggtgagcaagtcagacaggtgggaggtgggctgagtcagggcggggaggctggtgtggccgcagcgacatctggtggccagcgctcttaacagccaccaggttcctggcctccaggtgctacttcaactcctggcttgcacctctggcagcggagcccttcccctgtggcctcccagaggctccagccaggcgagcactgtgtgcccacatctggctgccctgtagggggaccgtgtccattgaggctcctcccctgactgtgaggccaggcaagctgtaatggtataaaatggacatgtttggggacactggcctgggagccaggacacctgggggtcaggggacagggtggaagcttcccctctcagcttcagagtccccatctaggaaatggaaatgaccaggtggcactggatgaaacatacaaattacatacatgcaactgcaaagcaccaaagaagaaaatactcccaaaacccaatgcaattaacctgacatcaaggcaaccactgcgcctgacactgagctcaagacagagctcaagacgccaaaccactgcgcctgatgctgaaccactgcgcctgacgctgaactcgagatagagctcgtctagtgccgggggagttgctgggcttcctgggrrgggcttgatkatgtgtgtgcgcgcacacacacacacacacacacacacacacagttacttgggtgggacttacagtgattttgacctgggtcatttctactgtgtgtgtctccagacccaagtctctggggaaggggtggctcaactcagaggagggtgggcaatgctctagtgcccagctgggcacactcaccacaattgctgtccaggctgaccgtaaaccaaggctgactcctggtgccgtccctgctcctgggggaacggggggtcgtgggaagccctcatgttgctgagaagcaggagccgtgcttttttccaggtttcacttgaaaaagaagatgagggtctggcgggactccttcttggtggagagagggtgagtgccgggtcctgggagggacacccctgcccacctccctccctctgcccaggaagcttctgtagccccaccgcatcatgctattcaggagctgcccatggctctgaagttggtccaaaggcccctaaacacaaagcccattcactgctcctatagacacagaattggggtctgaggtcacgtgtacgcttttggcatgctttgtccagcctctacaatgtcttcaatttatttaatttattgccaactcatgcaatttgggaagtttcttataaaattccaatgtcttaagtttcctaaacatcagaagacccgggcaggtggccctgcgccctccactgtgaggaaaagccggagccgagggggcacccctctaggtgggcacacatgcctccggggctcctccagagctgagaggccggccccgcggctcctgctctctgccccatagcaagctgctacacaagagagacaatgacaaggtggacgcccaggaggagaactttctgcccaagtaccagcgtgtgaaggacctgtgtcagcgtgctgagtaccagacggcgtgtgagcagctgggacaggtaagaaggctcccttccctcccaacggctccccctcctgactgcagccggccctgacctgcgaggctctgagagccgctgagccagcagggccagggcctcccaacgggtagtcctttgctgccgtgtggtgcccaagatgctgtttggtggtgcaggatgatgctcacaataagtgattcatttctcagcagcctttggaccctgaccgtgtcagaggccaagtgtcccgtgggtgtgtgtatgcccttagcgcctctctagcccttgccgatctctcttgcacgaaggccccagcaggagttaaattattttattttcaccatattcactttgacagtatcctctttgtgactggttttccttttataggagtaataagacatggctttttaaaataaatataggtaaggttttaaaaagtgaattgattgcaagagaaatattaaggaaattatggccaggaacagtccgtggctcatgcctgaggtcccagctactccagagctgaggcgggaggatggcttgagcccacgtgttggaggctgcagtgagctatgattgcgccactgcactccagcttgggtgacagaataagaccctgtctctaaaaacataagaaaaaagaaaattatctgggaagtatcagagatagccagaaactgacatgtttgggaaagcctgaaggaggcttttctgaggctggaaagccagggcaggcttggagaggagggtcgggggcggggcagggcagggaggggagtgggatggaaactctgccttggctggcccaaggggtgccggaggtgtgtccctgccctgcctgtcaaaggctgggactttgagctggggctggagctgtgtgcctgtttcacctatgagaaaaagcaaaaccagggccctggtattgaaggccaaggcctgaagtggatgcgtttctgatggactgcatttgaatgactccatcttaacactgcacacagaattagtacaggcccatacaggcctgactgtgcctccccacccagtgtgtgtttgtaaacccacagacccctcttagtcacacaattaacccgtatctgccaccgggcaggagctgtggatttcatccctccgttgtacagcatgaatgcgtccccccgcttgccaggcactgtcctaggcgcagggccacagcctcgaacatgctcaacagaagctcctgccctcccagagctgatgttctggagagagttcagccttgactttgtaccgagatcccagaagtggttctgattttagttctgggctaaaaggagtgaaatgaggaggccaggaagtctttgcccctcgacgagggaacgttgtcaagtcccccactggttctttctgatgtctcccctgacccagatcagggcttgggcagccagaatgacctctttgctggggccaagaaagaggaggtatcagcattttccaaacaatcagagcacaccactgaagccaaaggaagagagtgctgagggcggagtttggggcacttagcctaggccagctgggaggcagcaacccacggcccccgacccagccccggagctttggggacctcaggctcagacgtctgccccccatcccaggcaacggccctgctcacaagccggtactccccgagtgccgttgccatgtccctgcttgtgccgtgccttctggaatgccctgcccagtgtagaagctgtaccctgtggcccgaggacgtctcttaggggcctcacacccagccatagcattgtcttgggtaccttgtccgtgctaccccacgtggtagatgtttttttgtcatttgctgaacaaacgtgcccaggaaccgagctcatgtgcatctgtctgtctcccggtgacacggggacatcctaagggcagggcccggctagaattcatgtcatcattgccaaagcccagaccagggcccaggccgggcaggagtaaatgtgccctgggcacctcgtaatgatgatcatcacgggcaacacgtgagtgtaagctctacctccagccaccctatctggcaggtatgttctgtacacggggaaactgaggcccagggctcaggcaaactgcccacagcctcacagcttcaagtggtggaggcaggatttgaacccaggtagttgggctgcgggaccttcgttctcagcagctgtagggaccccaagtcaagccgacactggcccagccctgtggggctcaggcgccgcccccgccaggacagcctcgggacgggccatgtggacacggcttctacatgagtagttgcaggggcagcaaaccctttccgcacaagatcagacagtaaatagtttgggctttgcaggccacatatttgtttttgttcttgctttttacaactctgaaaacgtacaatgtaaaaaccgtccttggtttgcaggccatacaaaaacaggctgtgggctggagttgactagcaagagggctgctgtttgccgacccctcaagtcgtgccccagctgagtttgttgggttggagcggggagcaggcagtggggaaggagaattccaggcagagagagctaagtggacaggaggctgctcgccagcgcacacagctcagggcttcacgcagaactcagagccctggcttttcttgaaaaatcagacctgggcttctgggcctgtgctcccctctggcgacagtcagatgggtatagccggtcacagtgcccactttagcctccccaggtcccccaggcgcttctgggctggcctcattcagggccatgcctgctggcccatcagtctacttctgcactaaggaatccaggttgctggaagggcctgcatgcattgaaggggatgggagggtggcagggcgctgtgaatgcaattagattcagcctccaggtgagaacagatgggcgggacaggggcaagatgagcaggtgaaaggcaccagggccttcaacggcagcgggcgggggcagacggtgcagcagagggttgggggggatggtggcaccagactccacacttttccttacagctcttgcacctcccagttgtgtgacccaggacacatctctctacctccgtgtgcctcatcttgaatcggcacagtaatgacagcacctgcctcgtagggtagcgtgaggtgtagtaagcaagttaatatattaacacacagtgcttggcacatgctaagtgctggagagacacagggaacagatctgacccatggcctggaaaggtcactttggcacagaataggccctaaagagtcactgggtcaatgggctggagcagctgtggacagaagggaagagaatccagtttacaggtggttgcagaatcccgtgaggggatccaggaggctggaactggggaagagcagaaggatcaacacgagagatttggacagtgattctatctacattcagcgtctgaccacaggcctggagttgagtgcacacgtggagcctctgcacacactgcactgattgagtctgggaaggtggtcaggggagacctccttgcgctggagcagacgggaaggaagagaagcctccagcagcaggaagggctggagaaaaggcattctaggcagaaggaacagtgagcgccaagtccctggggcagcagcccacaggggatactggagagagggctgagggagaggaggaccgatgggtaggccagggccagattgcagaggatgttcaaagactagtatcaggagcttgggtcttgtcttaaagacagtgggagccattgaagggttttaagtaggagagtaatatgatccaacttgccctttaaaaagattcctctagctgccatgtgggtggattttaggagcagacagaagcaggtaaccgtgagagtggtggctgtcggaggcatctcgctgggggatgatggtagctctgcccaaggttcaagcagtggcagtggagagaagcggcattggagatagcagaggtggggctcggtaacagctggatgcaagcagggagagggatgtctccagggtggatgggggtggcaggggagaggcgggtttaggggagcagatgagcagctggccgaggccctggcatgtctttcagaagtggcagtgtgtggaggacgccacggggaagctgaagctgcataagtgcaagggccccatgcggctgggcggcagcagagccctctccaacctcgtgcccaagtactacgggcagggcagcgaggcctgcacctgtgacagcggggactacaagctcagcctggccggacgccggaaaaaactcttcaagaagagtaagtgtcacaacctggctgagtgggacaggaggagagagaccatgcctggggggccccattcattcactccgacagttccacagagactgtcactttgccaggtggtgatctaggggctggggacacagccacatctcctcacgagccacccattctagtggggagcagtagtaataaacagataaggccaggcgcaatggctcacgcctgtaatcccagtactttgggagtccgaggcaggcagatcacctgaggtcaggagctccagaccagcctggccaacatggtaaaaccccgtctaaaaatacaacaattagccagatgtggtggctcacgcttgtaatcccagctacttgggaggctgaggcatgagaatcgcttgaacccaggaggcagaggctgcagtgacccgagattgtgccactgcactccagcctgggcaacagagcgagatccatctcaaaaaaaaggaagaaacacacatacaaggttctgtattgattggctggtgaaaatgctaggaccagaggttcacaggaacccagctctgtgcttcccctaggagccatgtttcagcgttcaattagtcagtgtttgtggtgagtttatagaactaccctgggctgggcgcggtggctcacacctgtaatcccagcactttgagaggccgaggtggacagatcacttgaggtcaggagttcaagaccagcctggccaacatggtgaaaccccatctctactaaaaatacaaaaaattagttgggcgtgtggtgtggcagcagagtcgcttgaacccgggagcagaggttgcagatagctgagatcacgccattgtgctccagcctgggcgacagagtgagactcggtctcaaaaaaaataaaaaataaactaccctgaagaacaaaaatagactatagttgagtggggaaaagcctcactcagctgaagaagtgtctacaccttcacacctcattctcggcaagggccgaggagaggacagtcagacagaagccagggagcaggcgaagtggagagagggactcttctagacccagccagaaggctcagccgccaccctgggccatcgcttcaccattctgaggctcagctcccaccatcaaacaggaagaatggtccctgcatgactttaaaacaagaatgagcctgtgccctgaaaatgtgtggaggcgtcggggtccgccggctagaagtgtgccctccaaggctgggcagcttcccacgtagcccatttctctggcctaaggacagccaaagcctaatgagagattttaggtgttgtttttaaaaaaaattatggtgaaattcccataaaatttatcatcttaaccatttttaagtatccagtagtgtcaactatattcccactagtacgcaacctatctgctaaatgaactcttcatcttgcaaaactacaactgtccccattcaacgttatctccccattctcccaccccgctcccacccccaccccgttctcccaccccgctctcccaccctgctgtcaccccattctcccacccgttctcagcaaccactcttcttctctatgagcttgactgctttaggggcctcatgtaagtggaattgtacagtatttgtccttctgtggctggcttatttctcttcgcataatgttctccgggttcatccacatggtagcctgtgttggaatctccttcctgatcgggcacagtggctcacgcctgtaatcccagcatttcgggaggccaaggcaggcggattgcctgagctcagaagttcgagaccagtctggccaacaaggtgaaacccgtgtctactaaaaatacaaaaattagccaggcatggtggtgggcgcctgtagtccctgctactcaggaggctgaggcactagaatggcttgaacctgggagcgggaggttgcagtgaactgagatcatgccacttcactccagcctgggtgacagagcaagactgtctcaaaaaaaacaaaaagtctccattctttataagacggatgatattgtaccacagactagttagagattgaggtctctgacggcaggcgcagtgatctcctctggtccagccagccaggcagcaaatgtcttcatcgtggagcagataagtctctctccataacagcccagccactgcctgaaacaccgtttcccagctgatgaccctccgttacatttcctcaccagctgattaggaactactacattaacttttctagctgaacagaatgattggtttccagattggattacacagccagcatctccttgcttcaatatgtggcacagtcgataatctttaaataatacaagatctggcagggagaaattcagctcttttccccttattaatgcttagaggaaagaaaaatacctaaaagtagctgagagtcagctcagccctggtcagaatcctcatgtgagtgtaatgtcagagccgggacctgcacctctcaacagccctgtgagcagggcaggggtgatcatcaggggatgatggacaggaaagactgggtcacgtggctgatttggggactccagccccatctcctgcctggcattcttccccctgctagagtctccgacaagacactctgtccctcttttctgagcagtcagcctagagcaggctgaactgggggctttctgtcccccaggggacacttggcaatgtttggagacagttttggctgtcacaattgtgtgtgatggaggggtgctgctggcgtctagtgagcagaggctatggatgcggcaaaacatcttgcaacgcacaggacggcccccaccacagagtttgatctgaccccaaagtgtccgcagtggtaaggttgggaagccctggcccaccttgatccacggggatcctggctgtggcgtggggaggttaggcagagccagccagctcacagcagaagggggacccaggaacaggagaaggggacgaggactcgggggatgggcccagctgactggggttcattcatttcttgaactttgtgcaagacactgagattagagttgacctggagagacacggacttggacctcatggatgaaacaagatgtgaacaagtgaacaaagggccacttccgctggtgaaaaacgcatgaaggagacgcagcggtggcgggactagcagagaggggtggcggctccagaatggcgctcaatggacatttaatgagaacaaagtacagaaaggagcaggtcttgtgaccagccagagagcaagtgttctgaggaggaggaagatggagtacaaagaccctgtgctcagaatcagggcrgtgagtcccagtcacagagaggtgaccggtgtggccgagggtggtgagaagcaccatgggcatgggcagccacatcacacaggcggtcaccggcgtggagaggcagggagtgggcccagggttgtcaccttaggtgaggacgtcagctgcaggcagagtccccaccccctgcagtagctggtccacaccagctcatcaggcatgaatgcttcactagttccgtttcgtgccatcctccaaggagcctttgtagggtaggcaccatcctgagaagttacccaaatcgccggggccacacatgtgctcaggggtttgcacctgagccatctgattgcagagtcaaagctcttggccgccgggttatgaagtcctgtcccattccctgttggtgtggcaggaagggtacctccaggactctggacatgaacacagagtgatggggagagcaggtagtgtggcttcagtccaggaaaggattcacacagggctggcataccgcttctgtgaagagccagagagtaaaggtcttgggctttgcaactcagccctgcgactgcagaggtataagggaatgcgagcagctgtacccagtgaaactgtattcacaaagacagatggaggctggcctgggcccttaggccatggtttagggacccctgaatctagagctgggagatggagggtggaaagaggcaaagcagctcacttatgagccgactgagacaaaaggagtggagaggacacgctgggtctatttcctgagcctctcggggcaggacctgcttggcacagggaccatcctcggcaatttgtgtacttgcatcgggagactaaaccgagggagagaagtgcccaggagaaggctgccctgtgtcagaaaaggcccaaggctctgctggagaggggaggcctttcccggcccctcaggatccttcggcccttgtgactctgatgcaaggtgtctgagaactgaaagatacaaaacatcccccaagagtgggggtggcacccgggccacgtgagaagggagccctttcctccctccttccactgccttccgccaccacctgcctccagctggtcctctttggtcaccatctcggggtcacttgggatccaacaaaacctgggtcactaactggctccaggcccttctctttaaatgaggcacatctggagaaggatgacaactgcagtgcgtgcctgctggggccagacatgtgtcaggtgggcagaggttttaaaacaggaaggagtggcgggggctgtggccaacagggaagacagtgggcagccaaaggggccgcccatccccggcccgtcctgaccatatggaactgtgggccmgtgagacatctgtttcctttctggaagctggaaatctggatccctacatcaccgccaccacctcccctttttctttaatgttaccaactcagatttgtttttgagacatagaagatacaggctacctggggtgtcacttcagcctgcacccctgagttttcagcgtcagggcgtatgcaaaagcccccctcagccttgttgccggcccacctgggtgtagcacctgcctaccacctggtgggcagcctccagctctctgggactcaaagaagctaagtggcttccccagtccccgtccatttctacccagagacaggcactgcagggcccctttttcccagtttaaatcaacatttttacatccatgatactttttttcctttttaattgaggtgaagttcagataacatcaaactcaccatttttacaattatatacaatgcagaggcatttaataggttcacagtgttgcacacctctacctagttccaaaacatttcatcaccccaaaagggaaccccgtacccacaaagcagtcactcctcactaccctctcccccagcccctggcaatcaccaatcttctttctgccgctatagatttacctattctgggtagttcctataaatagaatgtaacaatacgagcccgctttgtgtctggctggtttcactcygcctgcttttgacattcatccacgctctagcgtgaatcagaacctcgctcctggttctggtcgcatattccgttgtacagatgatgtaccgccatttgtttacccgcaagcagctctcgcttgaaatcctcttgagtcagtggcttcttggctccaggacttccgtcttgccggtgtgatcacctcgaggccctcccctgcggtccaggatctgcgagcaggcgggtagattccacgacccctcgagtcgcaggcaaagctgagcctcatgcttggaagcccggccctatcttgatgaaggacccactgccctgggagcctggccagcctttcctgcctccctaactctgccactcctctaatgcccacagagtacaaggccagctatgtccgcagtcgctccatccgctcagtggccatcgaggtggacggcagggtgtaccacgtaggcctgggtgatgccgcccagccccgaaacctcaccaagcggcactggccaggggcccctgaggaccaagatgacaaggatggtggggacttcagtggcactggaggccttcccgactactcagccgccaaccccattaaagtgacacatcggtgagtgtccaggtggaagtcgagggtgaaggggacaggacagacctcggcaaagggcttcccacacctcttgggcccctgaggaccaagatgacaaggatggtggggacttcagtggcactggaggccttcccgactattcagccgccaaccccattaaagtgacacatcggtgagtgtccaggtggaagtcgagggtgaaggggacaggacagacctcggcaagggcttcccacacctcttgggcacctgggctgctccccctccaccacctccgagccacacgtgatcccttctctcaagcaggtgctacatcctagagaacgacacagtccagtgtgacctggacctgtacaagtccctgcaggcctggaaagaccacaagctgcacatcgaccacgaggtgagtggrrrssggrrrrgragcatgctctcggccaccacgggcctggcaggacccccggttcacagtgggagggcagtgaggccagacccagggaagaggctggagaggtgaagtgaggtccccacagattcctcaacgcggggataggtgtcagtcccagsatgagacagatagcttcctgcccaggccgtctgagrgacgatggcttagccacgttgtcccccttttgaytwacaagaagtctacgctacaggaggcctttcatcaaacccaggggagacactggaggcctcagtgggctcagcgggttcctgcgcaggccaggccggaaaaatgactcggttcccttgcaagggctggctggaggagaaggcgggcttccttcaggcagaacaagtacctcctccccacccagacatgccggtgcttgccctggggcccgggggrkksmrgsykscscksykswgmrcasasacrssrsmgygkgggsrgtcaccaggccaagtctttgttgtccagccttgaaggtttcaaggcctcctcttctgcccctccctcagattgaaaccctgcagaacaaaattaagaacctgagggaagtccgaggtcacctgaagaaaaagcggccagaagaatgtgactgtcacaaaatcaggtgaggcagtagcaaagggacctccctaagaccccactctcctacaggacagttcagttcatcccctctcgtgattgacccctttcattttttatttttatctttatcttctcccctcatggcattaaaaaaatccgtaatttacctccctgttgtcagccagtgtggcacacggacctgctcctcagccaggctggcgcccagattccagtactgctagcaagagacccgtgctggctgcgcagagccggctccaggccggaaaagtgcctctgccgattgccctttcagaaatcccccatgtggtttgaggtccatgttcccggcttaggggtcccctggcccaaaggactgaactctagaacagctctaatagaacattctgtgctgacggaaatgggctatatctgcactacaccacacgtggctggtgcatacttaaaattttggctagtgtcactaaggagccaaattttttattttgcttaattcaaattgaagtagccacctgtggccagtggctaccatactggacagcacagctgtagaagccctgctgtctttccagaaagtgttgcaaaacacaggcttccctgtgttgaccccgaccaagtgtgagtaggcagggtggtgagggaaccaacctcaagatgctgaggctttgacatgtaaaattaaccatcaaaaaagaaaggaaaaaggatgctgaggctgatgcacctaaagccaggcccagcttctagtcgtggctaaattacaattaacccaacctgctaaagtctagcaaaagtccaggcagagtcctggctcatgcttggagaaagaagccactcaggcaggcacctgctgccctgaggatagggtcatgccctacccaccaccaccccagaaggagggacaggggtggggcagcagcaacacatgggagtcccagaaatcacagcttgcacctgccagcggagccctctgagccactcctgaagcctggggctgggggggtctgttacagctaccacacccagcacaaaggccgcctcaagcacagaggctccagtctgcatcctttcaggtaagagcagcttgaggtcctggggaagagatgcagaggcctgcatgaggaggtggccctcccttaagctaaaactcagaagaaaaggaaagaagtccaggcccttccctgggaagtccacggtagccctcgaagaggccttacttcccaatcaacactgagcgggcctccgacgcccccttgtggctaaatggggttaccgcaactccaccaagcagggcaggacacaggaaggaggggaaaggggtgtcaacaggagtcccagtagctgcctggttctgtccccagcttgtgcccccttgggagttaaagtagaatgacaagacccaggttctggtcccggctctgccttggagcagcactgggacttgggaccctgaattgctatgcccatggctctctgttggagaagcctcagcgaagcccttaggtggacaggaagagcagagacatggggtcactgatccctcagaggcccaaggtgtgtgtggccctctgcgcccataggaagggcctgcaagagaaggacaaggtgtggctgttgcgggagcagaagcgcaagaagaaactccgcaagctgctcaagcgcctgcagaacaacgacacgtgcagcatgccaggcctcacgtgcttcacccacgacaaccagcactggcagacggcgcctttctggacacgtgagcaagcccagggcaggggtggacaggctgaggcccaggggttcaagaaacttctccacttagtgacccagacctctctcagaaagggggtccccaacaccaggggtccacggtgctcgggacagcctcttggcatttgacgaactggttttaggggctgtccctgacaggaatcactgttggcagatggggcctcctcccgcaggcactcaggacatgctctctcttccttggcagtggggcctttctgtgcctgcaccagcgccaacaataacacgtactggtgcatgaggaccatcaatgagactcacaatttcctcttctgtgaatttgcaactggcttcctagagtactttgatctcaacacagacccctaccaggtacaggcaacccgagctagagggatgggggtgtggggtacaccagtgctgccaggtaggccccccccaacctcagggaagtgatgacaaattgtccaagtcccactgagtccctgagccggtgggagtaagttgtgaagctgctgagattgggggttctgtgttcaatcagccttttttgcctccatcaccctgctttttgcctccatcaccctgcgtgtgtaatatatatggcttcttccctctaacttaacatgcagcatgcaaccaggttttgccggaacttgtgaagactcctaacactgtcaggctgtaggatcaagccaaatatcacccactgcagggcctacacggaccgcgcagctaatataacagtaacacactgcaccaagcactctgctaagtgcttccgtacagtaagccatctaaacacacatgcgactgaagtggcccaggaccacacaagaccaaaaggagcagtggcatgtctggtcatcggaacatgtgggcccttgtacagggacagtcactactgagctccagcactagagctttcctgtactgtggccttggtattgcccaggctttgacctttcaagaaaagcctgaaataatttaaatgaaatctgatgtttaaatgtcagcagcacaaatgctttaattactatataggtgtgcagtctttctccttagataggttcaccctcatactttaccaaaggggtaggttaagtccctcaccggtagctcccagactacacaagaacccaggccacttacccgtcctttcatcaaatggctgctttgcaatcaggaggagctgagggcccctgaatgaaggctgctgataaaaccaagacttggaaggctttctttccaagcttgggaagtttcctgaccagtggctgcagaactccaacgttaaatacacagacgtggtttttattctcctgagttttcactctcatgaagagtgaacctggtgggacttgaagccaaaaagtcacctaactcttccaaacgctggctcttgcagaagttggagtaaacaggtcaccagcccctagcaccttccacccgccacctgcctgaaatatgtcccctggttggtagaagggcagggcgagagtccctgtacttaccttgttgacagactaccttttttgcaaccagctgatgaatgcagtgaacacactggacagggatgtcctcaaccagctacacgtacagctcatggagctgaggagctgcaagggttacaagcagtgtaacccccggactcgaaacatggacctgggtgagtaggcaccccaacgtggggcccttggacagcagggtaaccaaaggaagggactcaggaggtggtgtctaccccaagaatgagcctgaaatcaccaggctttgggaggtgatacagttccagacgagtcatgggagcccctgtccatagcaggcagatgacctttaacaagctgtgattcctgagagaggaacacctgcaccaactgcccaggaaacacacggaattccgtctcatttcattgtcctcccttttgtccactcatgcattcaacaaacacttcctgagaacttacacctgaaaccatgttgactaaagatgaccccatcctcgctgacttgtgtggagccagtgttgtcctaagaagagcagtccacagcaggaggcctcttgcttgtatggaaagggtaaaactggatggtagaatccagtgtgactggggaagggcactgctaaataaaaccagggtcagacctctgaactgagtcctgaaaagtaggatgcaatcgaccactgagaaaacgtggagggctggcgctccaggaagcttaaagtgtgaggagcagaaagcagctcagggggtgcagccaacacaactgaggccagtggagagtggcgggagggcatcgggccaccctgtgtggggcttcctaggccacggtagagtttagatttcatttgtggtgtatcaggaagccaatggagggttttaacctgggcaccgacatttgctaggtggagaatgggactttatgggagaaaacagcgaagatggcccagttatccagggagaaatggtggtggcttggactagaggtgggagcagtaaagatgatggatttcagattcaggtggtgaagcccccagacaacatggtgatgggaggtgcgggattaggagtcccaggtaaatcctgagttttgtttgggacaggacaaaatctgcagttttaagtttagaatgccaaccagatagatattttaagatgaaaaaagctaaacaggcatggttgctcatgcctatgattccagggctttggaaggctgaggtgggaggagacttgagcccaggagttcaaggttacagtgagctatgatagcaccactgcactccagcctgggagacagagctgtcgccccatctctaaaaataaaaaaaatatattaaaaaaagaaaacaaagctaaaagaaaaatgaagttcacttactagtgagagagagtggcctaaaaaaaacctttggtatttaaggtcccttggggaagggactgtgtctaggaggatgcctagagttcatgtcaggaaaatggctacacagcttaggaggaattcagacgctaccgtcggctctagttatgaagagggaagagctaatgtgtttacacaagatgttgcactaatacttctggtcaggagcctgatatgatcagaattttcactagtagcttcctaatctctgccactcaagtgctgctactcttgtgatcaaagtgcaatgacatattagtcactgtgtgccaggctctgtgctgagcattttacatgtgttagctgataagctttgaggtgaatcttatcctcattttatggaggagtaaggtgaacaaggtgggctgaccccggagcccacgcacttgatcctgccacatcctcgggaaaacttccccagagcccaaaggggaactccctcctgcacttggtcagggctcttggctttctgtcctctggagcacagatgttcatgcctgcatctacctccctcaccataactaaggtcagcgctgaatgaagccatcagggtcctgaaactgatcatggtgacactggattttaggcaatctacaaggctatctaggagacttagggcaggttcccctcataattcagtctacccctcataattcagtctactctgagtagggaacactatcagcatcatgggattgtgacaaaaaagcataagatggttttctggtgtgttggggttgttttgcctaaactatctgctcctgttttgtttttcatttctccttcatttaggacttaaagatggaggaagctatgagcaatacaggtatttcgttttattattaaagcctaaacaaagttctcctatcttggcccatccttcagtctcatctctgtgagtctgcacctgttatcttgagaaactgcccttccctctggtctgcccgagaccaggatcacccaccaaagataggtgtcacctaggagaccttctttgtatagttctttggggactttttctttcttggtgatggttaacattcattctcctttgacacttgaaaacttaggcagtttcagcgtcgaaagtggccagaaatgaagagaccttcttccaaatcactgtgagttgaggaaccagcttacaaatagaaatctggttctgaccgcttcattttgccaatgctattctatttgcatgccatttcttacataccaccctttgtttgttctcatgatgagggtgggggggaagtactaatgcacatctttccctaagaaaacacttgaatccatttcatgttttagattaatgccttgtccagtacactgctgttctcgctataatctgtgcttggtaaacttgagctattacttagaggttgagaagcatttaaatattacaaattgctaggcatcttgaaggctgtggctacaaaagtgctaactgatatacaacatcagtagtaggatggcctcattaaatggtttccaaaaagcccatgctacaaactctcactccagtgccattggaggctgacagggactaagagactggcaacctgtaaagttcacctctattctaaagggagcaggccagtttgctccctgcaggaatgggctgaggttcgccagattttctcattcgtctaccaaatccaaaaatgcaagtatgtgtgagaattctttatcattatcatctaatttgacattaagttaaccatgtgggcaaattatcgcccttggtgaactgccacttgcaacctctggtctactcatttcttcctttatatgcatataaacctgtgtggctttaataggacattagtaacaggtcacctaagcctttcttcggtgcttctagaattaaggtacagaatctttacatatcacaatctccttagccactattctgtccagatccttaaatgccatccttgccaggcattgggtgtataagtaaacaaaaaattgaggtgactaggtggtggcaatcccgttctaagtaacctagaaatattcattctcagcagccttgaagcaaagcttcctcagctataggaccgattaggaagtcatgataaagaccatgatagctaagtgctaagatgagtttgttttgttctttaggggacaactgtgggaaggctgggaaggttaagaaacaacagaggtggacctccaaaaacatagaggcatcacctgactgcacaggcaatgaaaaaccatgtgggtgatttccagcagacctgtgstattggccaggaggcctgagaaagcaagcacgcactctcagtcaacatgacagattctggaggataaccagcaggagcagagataacttcaggaagtccatttttgcccctgcttttgctttggattatacctcaccagctgcacaaaatgcattttttcgtatcaaaaagtcaccactaaccctcccccagaagctcacaaaggaaaacggagagagcgagcgagagagatttccttggaaatttctcccaagggcgaaagtcattggaatttttaaatcataggggaaaagcagtcctgttctaaatcctcttattcttttggtttgtcacaaagaaggaactaagaagcaggacagaggcaacgtggagaggctgaaaacagtgcagagacgtttgacaatgagtcagtagcacaaaagagatgacatttacctagcactataaaccctggttgcctctgaagaaactgccttcattgtatatatgtgactatttacatgtaatcaacatgggaacttttaggggaacctaataagaaatcccaattttcaggagtggtggtgtcaataaacgctctgtggccagtgtaaaagaaaatccctcgcagttgtggacatttctgttcctgtccagataccatttctcctagtatttctttgttatgtcccagaactgatgttttttttttaaggtactgaaaagaaatgaagttgatgtatgtcccaagttttgatgaaactgtatttgtaaaaaaaattttgtagtttaastattgtcatacagtgttcaaaaccccagccaatgaccagcagttggtatgaagaacctttgacattttgtaaaaggccatttcttgggagttttttggtgtgtctgtttttttaaagtattcaagatactaccagtcaacatctttttggaagaaaatgccttgggtttagaagattttcttaaaaggggagtagatggttgtagattgactaaaaagtctaccatacttcaagggactacaggtaagtctcatagtataccagctttggtacttcattttttaaaaaagtattaatcaattgcaaagaaattcgccttggccaacccttctttgtgtatcaggtagtctaacctgatacaagtagttgacagatttcaactatcaatcaccagtccaacccatttctcatttaacagatgacggagataatccctaaaagcacccacatttgtttcaatgccccaaacaggccaaggctccctagcaactccctagtggcgttttttaacttctcagaaactgttaccattatttgaaataggcttccttaacctcctttacccttwacccaacagggayttaammmaamarrrawwyaaaaaaaaaaaaaaaaaaaaaaaactctttaggctccaattttaaatagaaacctttatttacaatgacatccaaaatggtcagcaaagcagtcacagctcaccatcccccataagtcatttcawrtggtttcaattctwwgcaagataaagaataatttctatttttttaagcaacataatgtaaacttgattgaaactgaattcattctcaagagtataagtcaattcctgagaatttaaatattgctctcatattttattcttcgaaactccatatattagaaaggaagagagaaaacaccctgctcgtttattaacagtgtgccttggagttgaaaacaataaatcaatccttgaggttttgctcctaggaacctaattgtgaacaaaactcacagcttctgcaaataaaaagggaactgggcaggcatacatgtaactggcaatccattctgtttactttcagctgcacccacctctggatcaaagaacttctaggacatcaagccaattatcttctgtaataccctacccctaatatagatacccccaactcacctcagatattaaatactgataactaagtagcactgttattgatatttacacctttcaatccagatgcagtttagaaaagtggcatcataatatgaacattaacaatgtaacttccgtttattttttaaaggaagaaacatgtatctcctttatatcattctgatctttataaaatatatatattttatttatatatctttggattcagcaaaaaaaaaaaaaaaaagtaggtactggaaatatcccacattctaaaagcagatgaaaagattatactgttcacccaacagataccaaggtttgaaaaaatggggggtgctggggtgtgaggagaggtagacagcaggagtacaaagaattacctaaaaaagataaagggcaatacaggtaaaaacaaattatctcaaagactgcacctattaaaagaaatcttgagtttgcaccaaatgaacaagtagaaaatataaaaacttataataaacttcatttttctactatataaaaaagggagtgctgccttccagttagcctggagccaggtctgaggaaaggattgcaaaaaaatttattttttttttgtttttaataatttttttaaagtcaagaaagataagagcaccattctatttctccccacacacataacttaaagaagggtcagatacaattgagctgaaaaagagacagactgacctggttcttcctctgtctccaaacaggagagtatactatctgaaaagcacaggccactacaatggaagttttcggatttacaatctttcttagatatattttgaacttggtaggggaaagagggcaaactcataattgtctatactgctttgaaaataagatccactctggtggtgggtctggaaataatcaggattcacttactcgtaagcatatcaaagatattaaatgatcttaccttcagagacatctagaaagattggctaaatgtgtgaaattcttaaaattaactggctctcagttattgctagaaaatgataccaaggctagcagagacctctgaaattcacagacattcagaaacccaattccgtcaactatttgaaccaaatgaattaacccagataaagggaattaaacttgatttttcccttcctcccaactgactaaaacaggtgtcaaagagaggcaacagcagaaaagtggtagggggcagaagagggaggggtttaaaaggtgctcagttagactgtggctctgaatcacagtaaaactggctgttctgggtactgagttacttaagaaataactgacactattctaatccacagggacataatgaaagcatcacattagtagaatgaggggacagctgagcagacaccagaaaccacaccaaggattctactcgagatctcaatatgggattcaggtcttagcaaccaaaatctgaaaacgctcctaaaggggatgaaaaggtaacataattaaacatacacacacacacacacacatacacacacacacacagcccatgaattgctattatttcggactgcttaaaatccaaaagattctcttcaaattgctcgtttttttaaattcctgatttttttttaagtttatttccccatatctattctttccccccaaattaacaaagtgcttagttctggtagaggaatttttaaaaaattaaaatgcctacatctaaacaaataatctctttaaaaagcatttagattaagagattgaaaagagcgaggcatctaaggctggggggtggggaaggaaaagctgtggagcactacccctcccccaggccacaaaagtcaagggatgtctcttccactggtagcctcaccacacagcttactgaaatcaacaatgttaaatatttagcttcacaaactctgtaaaaatgagttgttgtgacctacaaaaaaaggtatatacatattttacataatacaatatcttaaaggtcatatttacaaaaaaatctattcacagaaacactgcgagattctgattcagaatgcagtacctggccttgggttttcagaagtttatttttaaaaagcattattgctctaccatataggcaaagggtgacaccagtactttaaaaaaaaaaatcatagttcttgtctaacacgtaagtgtaggcaaaaaccaggaatgtgtttcactattccctcaagacctcaagaatattgcatttatccattctttttaaataaagtgcactcagctgcacattagcatgtgaaaagtttgctactgctgcgattaaatactgtcatctcatttcctttctgcaaagccatttggacatccatgacagttcctggaggtgaagtattacaggacatgaatggcaaatgaaaaccttcattaggagaaagcctagggcaaataatagggacagagcaactcaacaccattagtaaaggacaattcagaatcaccaattccactggacaaagggtcaacacagaactactacacctgaaggctgggactatgctctttgtccaatactgcaactagagaaaccagatattctaatctctcttgattcttccaatgttctctggcccacctacgtgtatttaagagattttggctagcaaggcagaaaaaagtgacacaaaagttttatgatcagtaacactccatgtctccagaattatatccctaggaggtggaatgccaaaaaacatttctgttttgaacaccatgatacacagcagaaggaggggggaaaaacacgtagatattgcccttcggcttaaaatccagtcctgctcaaatgacatcacttaaaatacccttgatggagctcaaagctggtcctttcttccaagatggatgcctggaacaatgattccttcccaataatcctagtgcagtgtcatttgtacagtggtttccttaagaggtcctggtgcagagatgtcagcagtatttctgtcagcaaccaggaaaaaaaaaaaaaaaaaaaaaatgagtaaaacacatgctttgcacaacaaaaaaatacccatgtccacattcatggcttacagtgcagctctggctgagtgattcaggttcctgagatcccatcttacaatgcagctctggcttaccaaaagtatctaatggcccaatgccttcaaaccaagttttttcaattactatattttaagttatacattcaagttaaaatatacctaggacattctgattatagcctaggctttagttctatccagagaacaagaaaaactttttgaaaaaggtaaggaatcgatcccatacctgatcaggacccataggcatgccagacatgggcatggggttcatgttcatctgtcccatgtgaccactgctgccattcatgtgcaccatactatacactgcaggattcccctggtgggcaaactgctgctgggaaaaggagctgtaagtaaacaaatggtaatattacctctggaagtcactttagcgacaaagggcatgcccacagaaattactacaattgtgtcaaacattgctatacttaagctgggaatgttagagaaaactccctgacagcctgtgatccatttttcacagctttctgtactagacaccctaatagatatgtgcgtgcttgaaggactctcaaaatggacaagccaaatcacaccttctaatatgaacccagtcctttcaacctctccatccaaaaaggcttgactgaaaaatacattaagttcttggacttctgggactaggatgtgactaactttataagtcactgttctttacctgttcctggccaaatttcctgatggccagcccttcatttctgaggactgatagatggatgcagcctgcgggtgttgcatcatgggattctgggagggacccattcttgacgacatcattgcattgggaggactagacactcgaccaaaggctggatctggttgttgtcccattccttacaaaaataaaacagaagaaataaaaatgcccaaatgccttctccttagaatatcagatttctgtagtaattttgttttttttttaaaggaggtgggggtggagggaagtgataagtgtaagatacagagtgctataagatgctgcccccccaggtattctagattctcaccaagatgacgactagagtaacaggcttactacagaaaggagcaccatctggatcactgaaagatcagttgctttaatgggtttcctgtagaaaagggactccgtatcactcaactcacatcactccatccttctttaaagggcaggggagttataatcctcagatgacagggctccccaatagacacctttattcccaccatgttcctggaacctctcaaaggctgaaatgaagaggtatctgcatcactgtaataataaatccagggccgggcacggtgactcacgcctgtaatcccagcactttgggaggccgatgcaggcagatcacgaggtcaggagatcgagaccatcctggctaacacagtgaaaccccgtctctattaaaaatttaaaaaaaaaaacagccgggggtggtggaatgcacctgtagtcccagctactcagggctgaggcaggagaatcacttgaacccgggaggcagaggttgcagtgagccaagatcgcaccactgcactccaacctgggtgacagagcaagacccccatctcaaaaaaaaaataataaatccaagtcaccaagaaaatcaacttaaaagcccacaaagtgcattcctctcactgacttgaccaagcattcagagattagagagttctactatactggaacatacaagaaggggcaaggggacaactttgcagtgtttcttccagagtttggggactcttaatgagtgggactgaaaaaaatattcaactatgacaggatacacctgtctcaattacctgtgtgctgcagcatttttgttttccaatcatttaaattaatttggttttccttgtgaagtaaagagggagtgaatcgtgtttttgtctttcatgtgcaataaatgtaatgaagcttatgtccttagtaatgttaacttggggaaggcacattttcattgtcagatttaccataatttggttgatatggaaactgttgcggaggagcttgtggcattgtgggtcctgccaaaagcccatccatgctgggggaagcagtcacattaggaggtgggctgaaggcctgggtttgctgctgttgctgctgttgctgttgctgttgctgttgctgctgctgctgctgctgctgctgctgttgctgctgctgctgctgctgcatcatcatagccaccctctgttgtcggaagtgatgacttagcagctctctgctgcgttgggcgaccatttgagcattaagaaaaccctgctaatacccaagaaagagtgcaattacatatatatagcaagaacctgccagttgcatacatatagtacccccacaatacaccaggtataagacagaaaacacccagggccttcttttttttaacagggtctcactctgtcgcccaggctggagcgcagtggcacaatctcgcctcacagcaaccttcgtctcccaggttcaagtgagtcttctgcctcagcctcccaagtagctgggattacaggcgtgcaccaccactctggctaatttttgtatttttagtagagatagtgcttcaccatgttagccaggctggtctcaaactcctaacctcaggtgatccgcccacctcggcctcccgaagtgcttaaattacaggtgtgagccactgtgccggccaaaacatacaattcttcacataaaagctttctgacctggtgcagtggcttacgcctgtaatcccagcactttgggaggccaaggtgggcggatcacttgaggtcaggagttcgagaccagcctggccaaaatggtgaaaccctgtctctactaaaaataccaaaactagccagccttggtgatgagcacctgtaatcccagctactcaggaggctgaggcaggaaaatcccttaaacccagggaattgacgctgcagtgagccgagatcgtgccactgtactccagcctgggcaacagtgactctcaaaaaaaaaaaaaaaaagctttctggctattgcaaggggagggagggagaactgaagaagagggacctgaaaattatttggggttaaaagacaaaagacaacacactgtcaagctttaacatgactagaaacattccacaaagtaagaaaacatttaggggtggaatctgaggacaaatttttcaggaactatgaaagacaattacaggaaaatgaggattcagtgtgttggggtggtggagggctgaaacatgaagccaaaaaaaataagatggggttatactcagataagcaggggtccacctcagaaaatcttgaactttctttaaactttcagaaagaggtaaggggcaagcagaagctatctggaggttcagaaggtgacataactgaagtacaacaaggaagctgatttcagctctactagctacgggtcatctccaaaaagcaagcttttatcatctttctgtaggacattctagctcagcttccacaagatgttttattatcaagaaaatgtaaatatcagtacttccaagtaggcataagacaataaaaatcgagcatttcacagttgctttttaaaaaacaattataaacgatatttcaaatcacartagaggattgctgtgtggtcatctgcctcatgcacattaaaaaaacccctcaatactgtctccaccactggctggaagtagaagggaattttaatatcccctcctactacaagaaacaggtcatctcagaggctatcactgagaacaggattatgtattctttattttcttctttataatttcagaattttacccagtgtgcatgttgtttcataatccaggaacagaggaacatttacagatttattaaattcctaaacagccaagtgatagctgttctcacagtacagcaactgatcacaaagggaaccaattaaaaaaacactaatcgatggttttaatgaagaaagctctccctcctctgattcctcccagtcaccagccagagagaagaatggaagagtcgaaagtctttaatgcgactgctttcttacacaagaaattcagaattaccttcatttgtttaacaaacatttactgagagccaaccacaggccaagccctgtcctgagcacagagcaatgcatgtggagaggcttatcatcctcacctgggagctcacctggggctgcatcataggcctcatcaccgcagcaccaccagcagtagggttttccattttcaattcaagtgcctgtcggctctgattcaaaaactgaggtgagacaagttggttagaatgcaagcagagcacgtcagtctgccaaaacagctttccagaccctcagcaccagccaatgaggtaatatctccaaacacaataacctggctaagtcacgtctaaactgaaccagtactttcacactgcaaaaaggtcaatgttgaaaagtctttggctagcatatgatgggctactgtttggcactggggaaaaaaaagtaaagtgcaattttgcagcttaaagaatatcttcacacctgtaatcccagcactttgagaggctgaggtgggcagatcacttgagcccaagagtctgagatcagtctgggcaacatgaagaaaccccatctctacaaaaaattagccaagagtggtggcacactcctgtagtcccagctacctgggaggctgaggtggaatgatcacctgagcctgggaggtcgaggctgcagtgggctgtgactgcaccactgcattccatcctgaaaccctgtatcagaaaaaataataataaataaataaattttatatatatatacacacacacaatagaaactcaaaagatttatagtcaggctttctctgggattattcgggcacatggggaaatacctttaagttgatcagaggaattctgaataaactccattagctttccctaaatgacttttagtgaagaaacggcagaaagtaaaatgaatacagtaacacagcttttctgagtacctaaactgacttttaacaatatttatgcaatggagtctctggctctttggattccaaactcaggcatttggccgcacacggtggctcacacctgtaatcccagcactttggaaggtcaaggcaggaggatcacctgaggtcaggagttcaagacgggcctggccaacatggtgaaaccctgtctctactaaaaatacaaaaactagccgggcttgcgtggctccccagctactcgggaggctgaggcatgagaatcacctgaacccagaaggtggaggttgcagtaagccaagatcatgccactgcactccagcctgggcgacagagcaagactccacctcaaaaaaaaaaaaacaaaacaaaacaaacaaacaaacaaaaaaaaaacctcaggcattcatctacttatatggtttgaagacataaacaataaaaacaattgaattttaaaacatttcttggggactaagaaaacaatagggtaaacagaagtcatattttagaatattaaaagacarctctagttttataaaacatctagaaagaagagttccattaaaaatgctgaaatcaagaaggtttaagtatttggttattagcagtaaggatttttttcaaaaaaaaccttatctacctttaagactacaaagtcatcaagtaacatttttcttccccaagagcaatccttcctgacatttttttactttttacctgtaaaatagaatattctcataaaactactccttaacaaggagccatttgtacaaataaaaccttacacagaagtaaaacaaaaagaatttctttagttgacagggatagattgcaccagtggtaagaacactgagaaacatagtctgaaaacaacagaaggagaagccagagggaagaacacatgactggttacctgctggccctgcagcctctgctgaagctgcattctaagttgcttgggggtgtttgtccggggtctcatgatgttggctcgtgggtgcattccttggagaggaaaattgccttgctggttcatctgattcatcatagagttaaaagatggtgattgtccctgaagatgaaagcctccttgcattggaggcccctgtgctgggtatgtctgtccatataatcctgccttctgatccatcattactgctgcttcttggccttggaaagcatcctgtttgggctctaatgcctgtcccttaaacacaacacataaaagaacagtgaagaacatctatgaaagcaacagaagtcaaatgctctaaagaaagtgcaaaaaacatccagtcattcaacaagtatttaagtaaatgcttgttatgtgccaggcatcacttctctacatgctaaggatacattcaaaataacatcccacaggtgacagaaaaagaagtaaaagttgatattctgaagaagagaacaacctgctgtgctaagacaagaaccaggtgtactgtgcattcacctttattttctcatccacaggcactgaatgccaagcatgcagccagcatgcttgacatgtctctcttgaagcatacttcaccccactgtacttcgcaacacttctcatttttctcccatctctctggcctttccttgaatgaatgctaactgttcatcagggttcagtcctaggctctcttattttctcttgatatattttctacttaggtgctctcatccrctggtgataatgatcacatttttgtctccagccaaaacatctctgaacttttggttttgtttatggaaatgcctacttaacatccgcaccctgatgtctcaggtatctcaaacttaacaggcagaaaacagacaccatgattcccaacagcccttccccccaagcaggcttgttctcctccaacctaccctactatatcacaatacagttggccctccatatccatggttccacactcatggattcaaccaacaggggactgaaaacattccaggggaaggaaacggtagctgtacctgactgaatacacacagtcatcattcttcttataataattccctaaacaatacagtgtaacaactatataatatacataacatttacattgtattaggtattataagtaatgtagagctgatttaaactatgtgggaggatgtgcataggctatatgcaaatactagactgttttatataagggacttgagcatccatggattttggtatccacaggggtcctgaaaccaacccctcacagatgtcaaatggtgacggtacacagcatcaccattcactgcccaggaaccaaaacccagcaatttgattcttcacattctcccyttccaagagtaaacacgtgtgaccaccaagtcctgtcaatttttcctccagggcatatcatgtatccctcccttctttccatttcacccttatgacccttcccaggacacctcttggactgttaccatagtaactggmaactatgtttctattttgtcccatcaacttgggttcatgtgatcctcccacctcagcctccccagtagctgggactacaggcacacaccatcatgcctggctgaagatgtcttaataaagcaaactatactttaagttaaacatggcagactgatcatgcatgcttacctgcattcacttgctaaccctactaaaatgacaataaagggaactaagaggtatccagtttatttaaaaaaaaaatacttaaaaggtagtatttatccataaaacactaataacgcaacaagatcaagtatttccatatttataatagaagatacaaagtgaatagagaagtaggaaccagctcaacagaacagaaaaacttagacttatgtgccyacagaggaaaaatacatatgaaaaacaagcaaatgtattccacagatctattgagactccagtgagggtggtaggggatcagagcatggtgctgamatgaggaggttggttaggagtctgagtatagagcaggaggtcaactacctccctgcctgctccctgactcccgaaaggcctgtaccttctacctacccgacaaaggtacaggggttcaggggcaccaagcagagcctaagaaaggagtgaggcagaggctgaaaacaggaaattttatatttagcatatttataatttaaataaaattttatattttataatttaatatcccacacttgcctccctagcccagctcccaaaatgcaaccaggtaataaaagattaccagatggcaggagtggtagtggtggttgaaaacaactctacatgtggaaatttggggagtcctggccaggcgcggtggctcacacctgtaatctcagcactttgggaggccgaggcaggtggatcacgaggtcaggagttcgagaccagcctggccaatatggtgaaaccccgtctttactaaaaatacaaaaaaaagccgggcgtggtggcgtgcgcctgtagtcccagctactcaggaggttgaggcaggagaatcgcttgaacacaggaggtggaggttgcagtgagccgagatcacgcttctgcactccagcctgggcgatagggagagactccgtctcaaaaataaataaataaaaatttggggagtcctgaaataaaagggctagggctagttccccacttaattaccctcagtaaagacaactgatgctgctcacacttgcaaagtgtcaaatcagcttcttaatgtctcactcttaacatataagaacagtcagggatcaccagatacttgataaaagcgtccaacactttccaagcttgaacgtgactcaagcaaatcaaagacaagaaaaatagagaagacttcaaaatatagaatgaagggccaggcgcggtggctcacgcctgtaatcccagcctgtaatcccactttgggaggctgaggtgggtggatcaygaggtcaggggatcgagaccatcctcgctaacacggtgaaaccccgtctctactaaaaatacaaaaaattagccaggtgtggtggcgggcacctgtagtcccagctactcgggaggctgaggcaggagaatggcttgaacccaggaggtggagcttgcagtgagccaagatcacgccactgcactccagcctgggcgacagagcgagactccgtctcaaaaaaaaaaaaaatagaacgaatttaatgcccaacatgtcaacagaaatcccagaaaagtaggtcagaaaaaaaaacacaggagagataaggttaataaagaaattatacaagaaaacacccctaaaccaaagggaatatcagtgtatctagtacacagcagaatgaatgaaaaaagacccataccaagatacagcatcataaaatttcggagagaaaaagttcctaaatcattccaaagagaataaacgggtcacatgcaaatgaatcaaaatcagaaagaaatacaactcagtggccacactagatgccagaaaactatggcagaaatctttcaaaagtatataattattttaaacctagaatgtaatacatagccagacatgtaggagggtggaataaagatattttcagacacatagaacccaaaacattttatttcatgcagtagggatgaagaagttaatagaagttgtgttgcagcaaaacaaaggagtaaatcaagacagaaagcgatttgagattcaggatactaggagtccaacacaggggaatagtgacaattattaatttctagacttgcctcacaaggacacagtaaaacagagagaactacaggagggaaggaaggaattgatgggttatttagtgtgcctgaacaagtaaagaaataaaaaagaacttctatacttctgttggagtataaaatatggctcctcagtgccaaggttctatgtcactggtatccctgaaggtgtacacaaggactgctcagcgtttcccatctgcactgtgacagcatttgccacatggcagtgtacttccatatgtacacatctatttccccaacaacaactgacagcccctgatgatctttcctgcttactgttgaacgcacaaacctatacagtggcccctccatagcctttaaataaaaacagtcatggctgggcacggtggctcacgcctgtaatcccagcactttgggaggccaaggcgagtggatcacttgaggtcagaagtttgagaccagcctggccaacatggcaaaatctcatctctactaaaaatacaaaagaaattacccgggcgtggtggcgggtgcctgtaatcacagctactcgcgaggctaaggcaggagaatcacttgaaccctggaggtggaggttgcagtgagatgaaattgtgccactgcactccagcctggttgacagagcgagactccgattcaaaaaagaaaaaacagtcactacagaatgtgtctttcagaaatacagatttgtgaatggcatgttttcataaggcggggtatgtaaacaggaacaggacaccatgatgttaggatgttcagcttggccattgtaaacaagttttgtttaaacaaacaagcaaaaaaaaagcttgcctcagaatacacacggcttggctaagtagtagagaaagatagttataaaaatgagaactgttaacatgaataaaaggtcacatttttaagaacagtacagtagcttaactaaatcatttctacaattgccaaaaatagtgggttgttgaaagtaatatcgcaatcgtaagtatattttctattttaacatacgaattgagaccaaaaaaggatattttccaaatttaatgctggtatccatgaatgtagtgatataacacaagtactaggagagacacacacaggcattcttgtatgtggcttcatgaatgtgtacgcgcgcacacacacaaatatacactctcctacttccatgttaatgcaacctacctgattgacaagttcaggaatgcccaaagctctgtcaatttcttccaggcctgtggcatctgtgttgctgagaagagtgtgcagctggtccaataatgctctttcgtcactctggccttccaggttggaaggtggcccaacaagatcatccagggaattcctaagaagaggcctagaaaaagacttgcaatcaatgtcaatggtgctttttttttttctaagagtaatagatcacagcaaccatgcatagtatttttaatgaacagtaactcaaatgctacaaacacaaataataaaccaagtggtaaaaaagagtgaatggcatcaatttaagtttaaggcccacaatttagaaatttcaccaggccactttagaccaccatatacagcttaaacccccaatcccaacaccaaattgtaattgccaaaccctaggcatttggggtatagcagaaatgggggccagggggagggtagggaaggatgggagaagatactcctcacaaaaacagtgaaggaggtaataattataatacttgaaaattagagaaatcaaaagaataaaaggaaggatacaaatgttgagctatggccaggcgcagtggctcaagcctgtaatcccagcactttgggaggccgaggcgggcggatcacgaggtcaggagatcgagaccatcctgtgaatggtgaaaccccgtctctactaaaaatacaaaaaatcagccaggcgtggtggtgagcgcctgtagccccagctagtcgggaggctgaggcgggaatggcatgaacccaggaggcggagcttgcagtgatccgagattgcgccactgcactccaggctgggagagagagcaagactttgtctcaaaaaaaaaaaaaaaaaaaaaaaaaaaagaagggagccaggcgtggtggctgacacctgtaatcccagaactttgggaggtagaggtgggcagattgcttgagcccaggagatccttgagccgagattgcaccactgcactccagcctgggcgacagagccagattccgtctcaaaaaaaaaaaaaaaaaaaaagaaatgttgagctatcactgacgtgagtctggagaaataccaaaatgactttgtcacacttggcccacagagctcatattggcaagtgtaacacaaaccccatacacccacagcaagttgcctcagttctccaacacatacaagggcatgaagttaaacatttatcctgcctcagaaaagttctgttaacttgaaactatttgctctctattgagtagagaagcattcaaataaattcatatagagtagagaagcactcaaataaattcatatagttacatcactgtctgctcaatagatcagttcatttttattttccttgcttaacttactgtagaattcctgttagagctgacattgaccatggcctcttgcatgcaagtaaattactaagctaaataaaaattaaatacaatctacaattttttttttttttagagacggagtctcactctgttgcccaggctggggtgcagtggcataatctcagctcactgcaagctccgccacccgggttcacgccattctccttcctcagcctcctgagtagctgggactacaggcacacaccaccacacccggctaatttttttttttttttttttttagtagagacaggggtttcaccttgttagccaggatagtctcgatctcctgaccttgtgatctgcccgcctcggcctcccaaagtgctgggattacaggcgtgagccaccacaccgggcctacaatctttattttatgaaaaattttaaagatgctatatagttatttcactatcatcactgaaatgtttaaaataattttagaaaacaattagccaatccttaaaagaattttctcaataggcagcaggtggttgggggaaaagaaaagtttttttaaaaaagtttaattttctggaaaactgaggctaaccctctgaagaacatttataaaaccactagaaacatgtacttatcttttttcccctcctcatgggactagagagacaatcatctcacagagaggctctcagaggtttggccactgaatggccctaatggctggacaacatggttgtatctcctccctctcctgtgaatgccacacgcactgcttactgcttcagcctcatttttacacagagttacacgagaaatgcccagctggcaacccagtacctcaattatagggaattctcattctctttcacgtttgcttctgtgctccaactcttttctaaactacccaatgctgagattttctacagagtcacaaaataacaccccacctattttgagtgccatgagaaacttgttccatggacaacatgccatcgggccaggaacccagttggttagatgctgctgcttggccatagggattagcccccattcccatggggatttcaccaggccctgggggagcaaaaagaaagcacaaattctcaaataagagcaaaaattatcctgaaacatctaactttcttttttcatgaagaggggagggtggacacttactcatttgaagcatctgctgctgctgttgcaatactggtctcgcacctggtatgctattagaccgaagaggcaatgtgggaatagagccacccagtgcaggtctgggtaaagaagtattataatctcctcctggtcttcccatggagtttgaattcataggttccattctgccggcctttgagtttggtaagccccagtctcctgaggaaggagtctgagtcacagtcacatttcggtttggcccacctaaaacaggtagccatacttaggtcttttccatattataatgaaatccttcttataccatgtaagtacagccattatacacaacatcaaccttgacaaaacagcactttgtcatggtaagaaaagggctggccaactgtggagacataggccactattctcatatattcaacaggctggaaaatgtcatagaccaaaagactcttgaagagtttacataaccaaaacatagaataaatgaaggatattcatggaagaaacatactaacgttattcaaaaagttattatttactcccaattatttagatggctttaagtattttaaatatgcttttcccaaaataatcatacatactaattagaaataacgtacccatacttgagccataattttcctgactatccatcattcttggattcccacccaacatgggttgctttggtaacatggggaaagcactgatattttttactggaggacttgagccaacagaaacagggctatccagagacactgctcggttatatggaggacgaatagactgcacagactgtgaacttttcaaacctgttgaaaacacaatacaaaaacatttcttcgtgatttaatatataaataatcaagtacaaaacacaaataccaccactccccacccaagaatgtctttcttacaaaaacaaacactgtcttcctttacaaaataagtgagggaagtggccctcacccaccaccgccaccccccgcccccctgccagccaaaaaagggtctcatattccaaataaagtagaaacaacaatctccatgtcggctgaagtactgagaacttttctgtagcctgatatggtcactgatactctgcgcttcacttaatattgaaaaattcacaaatgttccaagctcctgaaggttcttgcatatttgtacttaagtatactgtttataattttaacaatcaacttaaccagataagttgccttctgatcgaaaagaaataaaatgtaaaatccccttctaaccttctttttttcccccccactcttaattgatctatccattctagtttaggaaataatgctactgaataatgaccattctgaataattgtgcatgctgccttttcaattgacacacacaatatatctttgtttttctgtctgtttgtttgagacggagtctcactctgtcacccaggctggagtgcagtggcgcaatcttggctcactgcaaccttcgcctcccaggttcaagcgattctcatgccttagcctcccgagtagctgggaccacaggtgtgagccaccatgcccggcctacctttgttaaattgatgaagtcaacacacagcaacaggagaggggctagataagaaccagcaaacaccaaagaaaactatcttaattaaatgacaagattctgttaaaacaccaatggacaggttttaatctagagtctgagttgctttttaatccagttctctgtggctaagaaaaatatatgccctagtacctacagtactcacctggaataatcaaacatgaatatttttctataagtgccatgattactggcatattagttagaagtgggaaatttatttaatttttaaaaaacaggaaaatgttcaaaaagctttctaaagcacatataaattagtatagaaaacagaggcagaatatatgttctgaagttataaatgctatttatatcctggtcttagtgtaagagtgtttacaggtatgcagaaaagtttcaaaggcagcaaaaaaaaaaaaaacctagttcattcttacccagagaattagttccttgaaacacctgttgcttagtccccagatgactaccatttgaggatatggaattattgtaaaagtcagaactagtcagatcaccaagaatagcatctagattatccaagtctccagatccctgaaaataaagttttaaaaattaacctgtatacattaccagacacacaggtataaacatacccatcagaaaaaatgatacatgaaatagaagcaagtaaaatacaaaaactacctacaatgataatacccacctgaaaggccagtttattatgacccccatctctaatcttcctcctctgagattaaatcactacatttggtcctttcaaaggggcattttttaaatttacacaagacatttaattctcaaactgtagaatattttgcaggtaacagtcactagcagtgcattgataattagctaacagatatctgcatctacacaaaccttctgaaaataagtgtgattaataataaaaggagcaagctgggatgttcataggcatgctctaaaaagggcttcggtcaataaatttggtgaacagtaggttaagcccacatcctaactttaagcctttcattttctcaagtgcatattaatatatcctataagtttgggaaatgcttatacagaatgtcatcttgtgcatgaaacttgattttaccttaaaataaaaattatgctgcttaatacaagttttttttttcctgattacttctaccattctcttaatgacccaatctgcccattccagcaataaacacctccatgaaaaaatttcatattggctactaaagagttatagtcacatcttaaaacatacacatctgttatttctaaattacatcataattttactgacatccaaaataattataaagaaatgagagctaaagatttaactttctttaaataaacctaaaatggaagaatttttatatcacattatctaacaccgaaaaatgatgaaatatgagctgaaatatacagaaaacaaattacctcttcacttgtctctgtcttaattttagggtctttctcttgacttgagctaggaatggtggagctggtgcactgactcattttattatccactccttccacttggggctgtagttctttagagagtgcatcactaggatcatccctgtccagcaggtatctaagaagtgcattattctccttcttcttaggacttagctgctcctgcttgacaacatttccgtccccacaagaagttatactgctggtgtctttcccagtggcttctgcagtaatcttggctacctcagctggtgaattcccattctgcagcaacttgtgcaaaatccggtgcttctcttgtaacagtgacccatgcatattggatgtagaggatactcctccagatgtagaggaggagactccagaggggctggtgacactaacagaagattctttacaacttgaatctaggggggagttggtcaaggaggaatgaccccggtcatcagaagaacaggtaagtaactgcagtaattttttatgacctttgctttccaaaggacccctttgattctctgccccctcaacactgctctccttactttctttgtcactgaggtgatctctgctatttgactgacacattgaactctccactggattttggtcgcaataaaagcccagaggactcttggaatcctgattgcttactttacttggttgggtaatattcatattgggagagttatccaatttggggcctggtgatgacagagtagataaaagggaagtccccacaccttcactgatggcttgcagggcactgagagagctgctggaaaagctgtggttcccagtattgccagaagatgccatgggagagtgcacacctgaatttgaaaaaaaatttaggaaaagaattagactaccagacactgtaacaaaatacaacttaattcttcaaagtttctattataaaatagattaactttacaagaattatagtagtatggaaagaataattacttaaaaagaaaaaaaataaaaggaaatgtcaacacaaatacctgcaacaggagaaaactgatgtgaggctatctttggactcccacgattacgaggagaaatcatgatattctgctggtttggggcaagaccaggactcccatgtggggggctactcatgttgagcccatagttgttgttctggtaggaagatggtgattgcatgcctggcccaggggtcaatgaagctatgttactggaacccccatacctagctccactcatctgccctgtggtgctagggtctgccaagccataggccctgctgctcggcatctgtaagccttggtttggcgacatactcatgccgcctaccgaactgttgcatccagccataggtggtctaatcccttgtccaacaggatttgggtttggtctatatccattctgttctctgcaaaacaaacatcaaacttttactaaaaaattctaagcatgcatgaaagcttttaatcagatttaaaataaaataaaattttaaaaaaccagccagctacagtggctaacacctatattcccagcactttgggaagctgaggcaggaggatcacttgagctcaggagtttgaaaccaacctgggcaacacagcaagatcatgtctctacaaaaaatttaaaaattggccaggcatagtgacacacatctctagtcctagctattcaggaggctgcggtgggaggatcgcctgagcccaggagttcgaggttgcagtgagctgtgatggcactactgcacacctgcctgggtgacagatcaagactctgtctctgtttaaaaaaaaaaaaaaaaaaaaagaagaagagaagaagaagaaaggaagaagggagagagaaggagagggaataaaaaaatgggatgaattaactacccaggaacttaactttttaggcagcattccaatacctagtgacagttccaatctacatattgatcaattatttacctagtaacatatttttcagtaagccacagaatctatgagtgagaccactgtagtattatgaaagaccaacagctatgttaactggagtttcaggtgggctttattagagttgccacattatctagggcttcacctgggggtacctgcaaattactcaagataattaatgggtgaatatcctccccttcatgcatttcttatttgccactaccaacccagacagtaactacctttattcttgaagtttaccctcaaattttaaatgcagtccccaaagcaacacacattatcagaaatgagtggtaagacatgtaatcagattttatgtgctcttttatccacccattagccttcccatcacctagctttcctgtaaagtatttaataaataatcactttcacataaaaatacaaccttaaacatatcataatccaggaatctaaactcatttcatcaaacccaataaccttcctaaattttgtctcattttatcccttccctttttactttaataataaagcattttgagaacactgctgcattttgtattagaatacacagtaatctatcattacctctgaaggaagtgggttgagacaaagccatgtcgatcatttgttacaggatttcggaagagtttgctttttgtctgtgcagtcactatagttccatcagccaacgagaatcgatatactggggtttctgcatggccattaagataagctgttggggaaaatatcccatcactggtaactacagtcagcaaaacaaatatatataggaggggacagggaggaaatatacttcaagtacatttctaaaaatccaaggaaagactggatctgcaccaaaatcatcaacagggtaaaataagaacactcaggcatcattttcctacccctcaccaacaagagagcaactacagtcatgtgtataccaaacataatgacaaacaagatcaagaatcaaccacaaaaccaggtatggtggtgtgcacctgcagtcttggctactcagaagctgaggcagaagggtcaattaaatccaggagttcgagtccagcctgggcaagatagcaaggccctgtctctaaagaataaaatgataagaacaatcaaccccaaaattctttaccttcttgatagtgacgtttctgggaccatgactgcccatcatttagactaaaaaatctctgaatacaccttcggattatatcttcaaagccaggcctcatggaggatctcagtgaatttgtatctatattgacaacctttcctattaaacaaaaaaaggaaaaaaagacttatatccagcccacaagtatttactggctgcctacacatggcttagcactggagaataaaataaaagatattaaatctttgctccaccttctctgatccaaatttctactatatccacagcttttctccttaagacatagcaccacaggattctccctacatgttctgctaaggagtataataatacatttggtctttgtcagatttctagcacagagcccctatccaaaatcctcagaatttcctgagtaataaaagtattttcaagttattcataaagagcccctttggaacacacctcaatttatgctgatgaggagacttagggtggggtctctagatcacctcaggatggagctgataatcagaaagaccaagtaattaaaggattggaactttctgttagtagttccatctactaacctccaggaatggggcatgagggaggaaggagagcctggtgattaaattctataaaaaactcttggcctagcacggtgcctcacgcctgtaatcccaacactttgggaggccaaggcaggcagatcacgaggtcaagatatcaagaccatcctggccaacatggtgaaaccccatctctagtaaaaatacaaaaattagctgggcatgggagtgtgcgcctgtagtcccagctactcgggagggtgaggcaggagaatcgctggaacctggcaggcggaggttgcagtgagccgagatcatgccaccgcactccggcctggcaatagaatgagactccatctcaaaaaaaaaaaactcgggccagcaacagtggctcacatctgtaatcccagcactttgggaggccaaggcaagcagatcacaaggtcaagagttcgagaccagcctggtcaacatggtgaaaccccatctctattaagaatacaaaacttagctgggcgtggtggtgcgtacctgtaatcccagctacttgggaggctgaggcaggagaattgcttgaacccgggaggcagaggttacagtgagctgagatcgtgccactgcactccagcctaggcaacagagcaagactccatctccaattaaaaaaaaaaaaaaaaaaacctcttgaacaagagatttgatgagcttccaaaggatgagtacattaaggtgctgggaaggctataagcccagagagggcatggaacctccaaacctcatccccaccccctaataccttctcctatacatttctcccattgagatattcctgagttgtacccttcataagaaaccagtaaacctgagtaaagcatttccggatttcttgagccattctagcaaatcatcaaacctaaggagaggatcagaagcccaatttatagccagtcagtcagaagtacagaaggccaggacttgcaactggcatctgaagtaaagtacaggcagtcttgtgggactgaacccttaaccttgtaagatctaatgctaaacccaggtagaaactgtccaaactaaaattgtagggcacccagcttatgtcagacagagcgctggttagtgtagaaaaaaatacatctggggtcagaagtggtgtggcagtgtagaaaaacagtgttttcccaaatgctgtacagaatatatatcacacaaactccttttactgtctgaatgtactgaatatacatgtccagataaccttaagttcattttcgtgtaaagggaaaaaataacgcctatgaggaaagttgtttgtccgaagagattctgtccctacaactataagcaagagaaaatacctacttaaagtaagccagcagggacaattatttgcatctgagagatgatcacatttttgtacacttaatacctaaacttggagggttaaccaaatactcatttctacaatgctggaagcttctgacaacttttgcttaatatcaaatacaatggagacaccaaatatacatactcaaaaatactatgaaattaaagaaggtttcatgacaatagatggtccttaaaaactgtctaggccttttcactctaagcagcactagggtggttggcaaaagcaagtgccttacaaaaagtggcagaatgggagcaaagaagaaagtggttaatccatttcctaaaaaagactgatatgatgtgaaagcaccagctgtgtttaattggtaacaaactagtcaaaagggctcaaggaaccaaaactgcatctgatggcctcaagaactgtgtttttgaaatgaaccttgctgatctgcataatgatgaaactgcccttagaaaattcagactaattactgaggacatccaggtcaaaaactatgtgaccagcttccatggctggtcttggatcagctttcaggccttttctatgtctttgaatgcagacagaatgatccaagccataataactggtcacacagtttttgacctggacatcctcagtaatcttttctgtgacaaaatatgctccatggttaaacatggcagacttcataggaagctcctgctgatgtcaagattgccaatagttatctgttttgtataggttttactaagaaatgcaataatcagacttgggcaatctcttatgctcagcaccaacagatatgccaaatcccaatgatgatggaagttgtgacccaaaaggtacagacaaataacttgaaagaagtgggcaataaactgactccagacaaattaggaaagacattgaaaaggcttgcccaggccaggcgcggtggctcgtgcctgtaatcccaacactttgggaggccgaggtgggtggatcatgaggtcaggagttcgagaccatcctggctaacatggtgaaaccccatctctactaaaaatacaaaaaattagctgagtgtggtggcacatacctgtagtcccagcaactcgggaggctgaggcaggagaatggtttgaacccgggaggcagaggttgcagtgagccgagatctcgccactgcactccagcctgggcaacagagcgagactccgtctcaaaaaaaaaaaaaaaaaaaaaaagtcttgcccatatatttatcctttctatgacatattcattagaaaacatactgaagaaaaccaagtttggtttgggaaaactcatggggcttcatagtgaaaggtaattctgcaaaagctactggagatttaaaaggcactaatattgaataagctgacagaaataaaccaccagtccaataatctgtttaaaattcagaattttaatggtgaccaaaaatcttattagtagcagggggagactagggaaaagggataaacgcattctgggaaagagtaaatacctgtgcactcgtgcccaaaatagacatgatttgtcctcaaccacctctcctgagtttagccctgggccacatgacaaatacaaaacagatgtccataaaaagtttattaaatgaaacacatcagggacagaagataaaatatccccagaggtcaaaagtaagtaggatctcagttttaaatgatgttaatcacacaaagcatttgatctttcttgcttggcaatttttttctccatcatgtcctgttttctttcatgcttggtaatttctaacttttataataaacatgtatcacttttatatactgatgagataattttcaaagatgctacttgctaaattgcttaaagatattttatttagtatcttcagtagcaaatgtaaaacatggctattcaagtagaaaattaacactgccaaatcataagaggtgcagagaaagactcactctaaaaggataaaataatatataacaattgctgtcactatgtttatctgaggggagttaatacagagaaaatgttcaaatataaagtaacatacagccgggcatggtggctcatgcctgtaatcccaacactttgggaggccgaggcaggcggattacctgaggtcaggactttgagaccagcctgaccaacattgtgaaaccctgtctctactaaaaatgtaaaaaattagccaggcgtggtgatgggcgcctgtaatttcagctactcgggaggctgaggcaggagaatcacttgaacccaggaggcagaggttgcagtgagctgagatcatgccattgcactccagcctgggcacgacagagcaaaactccgtctcaaaaaaaaaaaaaagtaacatccatcagcgtaaacaagattatactgtgaattgtcaaaataatcctttgctacttttaattgtgaaaattaatctcaaaaatcctgaagataggttactgatggcataaaatgattgaatgactgcaaaaatagcaatatttctttaaaaatattctgcattatgtatattatatatacatattacaaacacacacatacatatgtaatagtgatagctatgttttatgtatacctactccatttttatatcacttgttaaaagtccacattgtaaaattagtgttacacaaagcaaagaatacaggctaagtcaggcagactcagctataaattttcttattagccatgatcttggacaataacccaatctctgtcaccaagcttctgtttctttatctctgagatggggcatatatgacaaacccttggcatccccatttacacttaggtgaccataagagtaaccctgaaggtaaataaaaataatattgccacagtgtttaatttcattaatgcatcttatcaaccacgatgtctttaattttttatttctatgattaaaaaatggcagaccaagattgaaactcaggttgacgtcaagaattactcccggccaagcacagtggctcacaactgtaatcccagcattttgggaggctgaggcaggcgactcacttgaggtcaagagttcgagaccagcctggacaacatggtgaaaccccatctctactaaaaatacaaaaattagccgggcatggtggcacgtgcctgtagtccaaactgtttgggaggccatggcaggaaaatcacttgaacccaagaagtggaggttgcagtgagccgagatcgcaccattgcactccagcctgggcaacagagcaagactccgtctcaacaaaaaaaaaaaaaaaaaggaattactcccaataattctcattaaattacttataattttttaaaacatgtttctttatgacaaatgggcttgaagttaaagaaatactaaattctgacgcaaaatgcaatttggagagaaaaccaggtgcccctaaattttttttttaatttatctgggggatttaaaatgccaaacatacccaattcaaatgccaagaattttagtgaaattcttttaaggttgcataagcaacatgaaaaaagatacacataaagcactcattacagtaggtatacatttctatgatagtacagattaaaaatagtaacatttacaaaaatttccaaaataaaaatgtacgtatacacagagagagagagagacaaaaaaagagtttttacctgaaagatcatgtctggtaataaagctctcagggtttgatggaaatgttctttctcctgtagtaatgcggcgtgccacacagatcatacaagattgcaaatctacaataaaaaattcaccctggtaaggattatacttaacttttggatatatatgttcaataggcaagcaaagacatggaattcagtaagaagggttacaacacaagtttcaaaactccaagtatggccactatttgtttcatgaacatcacaaacatataatagctcttaccttccccttcctccatcatagctcgtggctgagacagggcaaagcactgcattgtttcatatctctggcgcatttcaggactggcgtttatgtcttccagaatatcatgtggtgttttcatcaacatacggcaattaaatgtatggcttttttgtctttgggtctcatttgtccaggaaactccattaactttggaaaacaaattgaaatgacattttaaaaagctggtaactcattctatgaccatcatcaagaattcaagctgcattttctcattatgcatgttttccatagttatatctatactaacatttcaggctggcaatatacaaaacatgtgaataatttcaactttaacagaaatctcactgcatattttgtaactatatgcctcttaaaatgtataccaaatttttaattcactgactccatatgtgaaaattctgctattaaatcacatgcctttctaccctcatttgatcgcttgacttcctaaaagatacattcaattttctaagaaatggtcaaggaaaaaaatttaacctatttagaaaatacacattaaaagcctacctgtagattttggtaaattcttaagaaaatcctttctgtcttcttcatgtaagatattgtaaacacttgtgttaaccaggtcctcttgcttatattgcaggtattgtgtgacattttctgatacaaatacaatgtttccgtctcgattcaccacaaataggaaaccatccaatgcctaaaataggatatgttaatacaggctgttatggactgaattgtatcctcctccctctaattcttaaattgaaactctaaccatcagtgtaactgtatttggaaacaagaccttcaaggaggtaattaaagataaatgaggtcataacggtggggaccctaatccaatatgactggtatcctataaggggagagaaagacaccaggaatgtgcacgcagagaaaaaggccatgggagaacacagtgacaagccaaggagaagccaatcctgctgacaccttgatcctggacttccagccaccaacactgtaagaaataaatttatttggtttcacctaccaagtctgtggtattttgttatggtagtatcagcaaacagcaaccacagtagtaagtagaatgtgtaaaaactactgctgacttaattactgcaaacaactataagccaccattactactaacattagcaccattactacaggccttactggggggaaaaaaaaagaagaataattgggggtgggggagtgtgtacataaatatgttcagcatgaaatctgaattaatgtctaacctaatttttaaagaattatatctttaaaggagcttttaaaaatgagaaaagcatccttagctcttcccatttttccatttgatgccaagtcaagctacagaaactgctctactattccttaatgagaatttacaaagaggaatttcaaaactgatcaactaaaagtagttggaacaaactacctgaaacaaaaagaagttgacaagttaactttatgaagggcttcagcccctaaacaaatacaaagcacatgtttaagtcttaacaattcctcaagaatataaaaccatagcgtgccatgtgatcaatcacgcaaaaattcaccaaaaatgtctgagccgaaacgtacagtcatcataccccagtatctgtgtaaggttggttccaagacctcccaaagatagcaaaatctgaggatgctcaagtctccaatataaaatggtgtatttgcctatagcctatgcatatattccaatatactttaaatcatctctagattagttataatacctaatacaatgtaagtgctatatagtcatcacactgaggtgttttttattgttttaacattattttttatttcttcctcagcctccaaatctgtggtgcaaaacccatggatatgaagggccatttgtacccaaatatctctgtgaaattacaggctacctttcctttcctgcttgcttatatttttatgtttgtatatgtgtggttcctcagtttgcaactatatttttactaggggggcaaggcttcctgaattatgtatattgtaattataagagcattttaccatcatattcagaatactgaactgtctcaaagaaaaaaatgttttctttttgttctcatttcctaaccaaaatttcatcgattttttataactttataataaaccaaagggcaatacagcctactggacagttaaaatctttatacttgcctgaagtaaaagcggtcctaaggagtctttatcaataactccctgccctgtagaagatacatcggctttttgaacatcatcatcattggaaatagtttttcctgaaaagacagaaggtggtataacgaataacacactatcagttatagattaaatcaccttcgaatagtccccagaagagacataaagatacacatgcacatgcccatacatacatacaaaacatttcctcataagagaatgatgctacaatattataacatcaaaactaaacttcatagttgcccaggaagccagaagatacctaaatcatttcactactaaatgtactatcccacagcttcctgaaaaggaactaccaaataacaggcaattgtctgttaaccgtctctaaagagcataagctggaggcccagcgcggtggctcacacctgtaatcccagcactctgggaggctgaggcgggtggatcacctgaggtcaggagtttgagaccagcctggccaacatggcaaaaccccatctctactaaaaatacaaaacttagctgggcgtggtggcaggtgcctgtaatcctagctactcgggaggctgaggcaggagaatctcttgaacccaagaggtggaggttgtggtgagctgagatcacaccactgcactccagcccgagagacaaagcgagacaccatctcaaaataaataaatacataaataacaaaaagcacagctggtcaacacatttgtctattcccatacttgctagcctccatcagttgtagtctctacccaaacaaaggagcaaaaaggcaaatatagcaacaagttccttctaaaacaggggtccccaacccccagaccacagacaagtatcagtctgtggcctgttaggaatggggctgcacagcaggaggtcagcagtgggcaagtgagcaaagtttcatctgtattaacaacagcccctccccatcactcacattaccacctgagttctacatcctgtcagctcagaagtagcattagattctcacaggtgtgcaaatcttaatgtgaactccacatgcgaggaatctaggttgtgtgctccttatgattctctaatgcctaatgatctgtcacagtttctcccattacccccagatggatccatctagctgcaggaaaacaagctcagggctcctactgatttctatattatggtgagttgtataattatttcattatatgttacaatgtaaccataatagaaataaaatgcaccacaaacgtaatgtgcttgaatcatcctgaaaccatcccctctaccaggtccatggaaaaactggcttccacaaaaccagtccctggtgccaaaaaggttgggaaccaccactgttcaaaaagacatgagtgtttttattaccttgctcttttatttgacgtatctgtcttactgtttcctttaaaatcgcacatttatctggtttgacattgaaattgtcaatatcactaagattggcagatatcagctcagccaattcttcaatatatttactttcctgctcccgtctccgtttttcaccactgcaggtaagactaagggaaaaggcgtagaaaggggggaaaggagacataatatatatatcacaaaagagctgttagcagaatcagcccctatacaacactattacatgattacttttttttttttttcctcgagacagagttttcgctcttgttgcccaggctggagtacaacggtgcgactttggctcaatgcaacctccacctccaggattcaggcaattctcctgactcagcctccccagtagctgggattacaggcatgcgccaccacgcctggcttatttttgcatttttagttgagacgatgtttcaccatgttggtcaggctggtcttgaactcctgacctcaggtaatccacccaccctggcctcccagagtgctgggattacaggcatgagccaccacacccggcctattattttcatatgtaaacaaactaaactcagccaatataaactatcaaaaatgctgtcttggagaagtagtacaacataatagagattcatgtaaacctaaattcagttccatctttgttagctaggtggccttgggcagagttagcctcagttacttcatctagaaaatacgaataaatcatctttacttcttagagataataaaacaactaacaaataagaacaaaaacagtggtagctacttattaatgatgaagttttattcattgtagattgatatttttcaactagcacattaaacttcaattgacactgactttggcaaatactttaaaagctatagagtagtgttatatagattacattattttgtttctaatttttaagcttctcatttcacttggtaaaaaaaaggatgcaacctcacaaatgacaaaatatcaacttataacccattcttaaaagatagcaaagattcttacttataactgtcaggcctctgagaccaagcctgcacatatacatccagatggtctgaagcaactgaagatccacaaaagaagtgaaaatagccttaactgatgacattccaccattgtgatgtttctgccccaccctaacttgatcaatgtactttgtaatctcccccacccttaagaaggttctttgtaattctccctacccttgagaatgtactttgtgagatctaaccccgcccgcaaaacattgctcctaactcactgcctatcccaaaacctataagaactaatgataatcccaccaccctttgctgactctctttttggactcagcctgcctgtacccaggtgaaataaacagccttgttgctcacacaaagtctggtggtctcttcacacggacgcacgtgacataaccttggtcatctattcgtaactcctacccctccttccattcagaaattcttatagtaccgcgaattgttaatattctaccttctatatgaatcagcaataaaaaaaaaacttctattacatcaaaaagatgtccatctcatcagtaacactctacttaccacgaagtgaaaccaccaaaaaatctaaccagagaatgtaaatggcaagaagttaaaatgttatccttaaacaaaggcacaacaagtgtggtaaagcaccaggaaataagtcacctacccttgtcctggagtatcacatggcaatttgcgttttcgtgaatcactggccagtggatccaagttttctcctaatccactcatcttgaatatacatcagcaactaagagagaataatgagaaataagataagtacattaaaaaatatacatgactctatgaaggtgttatatgactgaatgactgcaacttttaattcagaactactttctctaaacagataattctcaatattctttttcataaatgactatactgaagacaacctcagatttcatattctaatatgaattatgcagaacgtatgtactccaagacagaaatgttcctcaagtcctactaaaaatgtgtatcttgcagggtgcggtagctcatgcctgtagtcccagcactttgggaggtcgaggcaggtggatcacctgaggtcaggagtttgagaccagcctgaccaacatggtgaaatcccgtctggccaacatggtgaaaccccgtctctactaaaaataaaaaattagccagccatggtggcaggtgcctgtaatcctagttatttgggaggctgaggcaggagaatcacttgaaccgaggggtagacgttgcagtgagccgagatggcaccactgcactccagcctgggtgacaagagctagactccgtctcaaaaaaaaaaaaaaaaatttgactgatggaaaaatagtatgctttggttaaaatttcattgatgaagaagataaatgtagagtacttcttgttgagaaagatgatttaagacatctactaagccctcatttgctaagaattttatctgtactaaactcttgtttaaaacaagacgatcactgttgtaaagaattacatgtcaaccaaagaagttcaacgattctaaactaatttttatatattaaaatgcatcttgcattccaactaaactctgagacgtatgctggaggacataaatttccactaggtggcagaatgctaccaggaaggaagacagatttataaaaatgaaaaaattcactcaagatgctgatcaaacttcaaatgtgtagctttaaaaaaaaaatcaaaagcaaaaaaacaaaaaaaataaaaatttaaaaaatcacatgatcataatataaatcagaaaatctagattgcaacattgtctttacagatgcactaaatatgtattaaattaccaagaaaattcattctataactttggttgtaaaatggaaaggctaaaaagctgagatgatttaagtatttgttttttccccatgacaagtttaaatgaaggacagaaaaagacttaaaataacctttattagtagtggctcactattattagtagtggcacagtcagatcacacaatctcaggggtattgtattttcaaacgtgtcaatgtcacaaaagacaaagaaagtctgtaaacagtccagattttaaaggaagctataagaaaatgacaactaaatgcaatatttgatcctagactgaatcctgtgctagagggtaagaaaatgctataaagaatattattggatcaactgacaaaattagaatatggacaatagacataaaagtatgttgtcaatattaatacacttaagttgataaatgaacgacggttatttaagagaccaatattcttagtataatatttggggtaacaggctattacatatgcaaattatcctcagatggttaagaaaaattgcatatataatgagtgagtgaataaacctgggaatggggacaggcagagcaaggatgaggaagggagttgacactaggtgaatcctgacccgggggggagataaacgtaaaaactctttgtactattttcttgcaaccttgctttaagtttaaaattatcctcaaataaaagagttttaaacttaaaggtatgttcggttttgattttccaattttcatatttaaaaagagtagctcaagtaatcccagtgctttgggaggctcaggcagtttgagtttgaggcacttgagtttgagaccaatctgtgcaacacagtaacaccctgtctctacaaaatttttttaaaaataagccaggcatcatggtgcacacctatagcattaactacttaggaataaaacaggaagactgcttgtttgaggagtttgaggctgcagtgagttatgatcacgccaatgcactccagactgggtgaccgagtgagactctgtctcttaaaaacaataataataataaattgaataattaaagagccaggtgcagtggctcacgcctgtaatcccaccactttgggaggccgaggcgggtgaatcacaaggtcaggagatcgagaccagcctggccaatatggtgaaaccctgtctctactaaaaatacaaaaattagctgggcgtggtggcaggcgcctgtagtcccagctacttgggaggctgaggcaggagaatcgcatgaacccggaaggcggaggttgcagtgagctgagatcccgccactgcactccaggcctgggtaacagagtgtgactccatctcaaaaaataaaaataaaaagaatagtgattccattccttaagtacaaaaatagaataattcttgttatgtctctataattggttttatatttgtttcattcaaaggtgatttttaaattgaatggcaaactatccattgagtaataacttttttttttttttttttttaaagacagggtcttactgtgtcacccaggctgaagtgcagtggcacaatctcagctcactgtaacctcggcttcccaggctcaagcaatcctcctgcctcagtatcccaagtagctgggacaacaggtgagcaccaccacacccagctaatttttgtattttttggagagacagggtctcactatgttgcccaggctggtcttgaactcctgggttcaagttatccgcctgcctcagcctcccaaagtgctgggattacaggcatgacccaccacacccagcctacatttctttattttaaatatgtaatttattccacattctagatattatttccttactttggcttttgtttataagctgaatccctgaaacaaatggagaaactattccatggataacagcacttctttaatttgaaagataaaattttgcctatattctcaatattatttcctttgttattaaatataagttgaatactcagtaaggagtaaggggcctaccatgtaataggtggtcaatatatgtcttgaataaatattgaataaatataaaagcaacattcaacctactaaatcatagtttagaaatttcctttattctgatctataacaatcattcaatgcaatcctactgcattaaactttttaaatgtttacttctacagttgatatagtgttacaataaattctgacagcataaattaaatcaatagaaaaactaagtcatgacaatctcttaatatgcaaaaaaattaataagcacaaatatcagtttaaaccagaaatgcagatcatttgtgttaagccaatgtttatgtgcatataatgaaacctaaatatgtcgagctatgtccatagacacatgcagctttttctcttgatctcacaaaacaagctacactgtacacataagcctgtgcaatcttcctgctaccaaacttactccttcagagtccaacctaattatccaaaaaggtactaagggaaggccgggtgtggtgcctcatgcatgtaatcccagcactttgggaggccaagatgggcgaatcacctgaggtcgggagttcgagaccagcctgaccaacatggagaaactccatctctactaaaaatacaaaattagccaaacgtggtggtgcatgtctgtaattccagctactcaggaggctgagacaggagaattgcttgaacctgggagatggaggttgcagtaagccaagattgggccattggcactccagcctaggcagcaagagtgaattctgtctataaaaaaaaaaaaaaaaaaaaaactaagggaaaataataacttaaaatcatgaaaaaggtgtttacccgaacataaaggtataattgtttaagatataaaatatttctatcttattttttgttttgttttgcttttgagacaagagtctcactctgtcacccaggctggagtgcagtggcatgatctcagttcactgcaacctccgcctcccgggttcaaatgattctcgtctcagcctcccgagtagctgagattataggtgtgtgccaccacgcctggctaatttttgtattttcaatagagacagggtttcaccatgatggccaggctggtctcgaactcctgacctcaactgatctgcccacgtcagcctcccaaagcgctgcaatcacaggcatgagccaccatgtccagtctctatcttgggttttttaggaacaggttggacagatttgtagttcttaattagacatggacaaaacttaggtacatttactgtacaactgtataagataccacaatgtctaagagtaaatgacaaattgttttataacaaaaagcaaagtagagcaaacatctcctgaatttcattaaactaaagaaaatgttcaacatgagaaataaaaaagcatttctggtccccaaaataataatttcaatatatacaataattcctgagcacaaatgactatgactaacccttcaggtacagttttctatttggtattaatcttagctataaacaaaaaatcaaaaatggcatttgttttagttgccacgcctgttatctccttctcactgggaggatatgctattttggtagattaagatataaaaggtaaatgcctagcacagacacaatagatctagatcactttcagtcaacagtcaagaatgaagatgagagaggggaataaggcaggtaccaagaccatgaagttcttaaccggtaagaaacatggaacagtaactacctgagactagcttacatttttacatcttaaattacaacccatctagtttggagaatatatgtagttgataaaagccatcttcaaagggcaaataatatagcacaacagtctcacactaagtttgattgtaagaacagtctaggccaggcgcggtggctcacgcctgtaatcccagcactttgggaggccgaggcgggtggatcacctgaggtcaggagttcaagaccagcctggccaacatggtgaaaccctatctctactaaaaatacaaaaattagctgggcatggtggcatgcacatgtagtcccagctactcaggaagctgaggcaggagaaaagcttaaacccgagaggcagaagttgccagtgagccaagaccgcgccactgcactccagcctggatgacagagtgagactccgtctaaaaaagaaaaaaaagaacagtctattaacatagagtcccttcttaattctgactccctacaattagatattatcacttatagttgaatagaaaagaaattaggacctatacttgctaccaagtaatctgtcctcctgaagttacatcatacatccaattgtgagatgcatccatattttgaagtttccactgcacctctaatgcacttccaagaagatacacaatccagtctcagaagccttttcaagcccctggcaccaaagtacagaaaagaactggaaggaagaacttctcattttatcagaattcaaaggctaaaaccaagtcaatctttcaatataaactctatcatccagatccatgagccatttttacaattattttccttatctaaaatgtttccactaaaaaaagttgtatgctacactacttaaatgtattaaatatggcaatgcacactttaagactgcatttttaaaaggctgggcggggtggctcacgcctgtaatcctagcactttgggaggccgaggtgggcggatcacctgaggtcaggagttcgagaccagcctgaccaacatggtgaaaccccatctctactaaaagtacaaaattagccgggcgtggtgacacatgcctgtaatcccagctacttgggggactgaggcaggaggattgcttgaacccaggaggtggaggttgcagtgagccgggattgtgccattgtactccagcctgggcaacaagaatgaaactccgtccaaaaaaaaaaacctgcatttaagcaatatattccatgcaattacttttttttggcggggcggggggtgggggcggggggcgggtggagtgcagtggtgcaatctcggctcactgcaacctccacctcccagattcaagcaattctcctgcctcagcctcctgagtagctgggactacaggcgcctgccaccaccctggcctagtttttctatttttagtagagatggggtttcaccatattggtcaggctggtctcaaacacctgacctcaagtgatccacccgcctcagcctcccaaagagctggaattacaggcgtgagccaccacgtctcgtcacaattactttaatgtagaatagtaacaatgagaatacctttcaatgctatcaaaatctaacgctatttctatattatatggaaaagtccaaagtatatccatgataagatttaaaatgaacaagtatcttacaacaactggatagaatgtttcctataaatactataggcctttctatacgtaacattcaagctatggaacatgttgaagcttagacatcaacagaatatataataaattgttagaaaatgaactttcatggaataactaactaattaaagctgaaaagcagcaaagaattatacctgctagctcaaaaaccatgaaaattttggtatatggcttagcagcactaatcagctttccttttggttatttgggattaagacaggagggaaaaagtttgattatacacagcaaattagctaaatggacaaggatacaggaactacgccctgtccaaaaggaaaagatatcaatcaacactaccagtgttcattaggcaagcaagaagttattttgagggacctaaaaaaagctatagtgtgccaaaatagcagatgggttatccagtaaatctaaattgacatagaaaccaactaaaatattttacttttcctaaattaataagggagaaataaggagataattttgtggtagtacaatactagacatctcatatatactgtaatttatttaccatgaccctccagagtatgtattactataatagtcccattttacagataaggaaatggctaactttccactagagcacacacagattctggatggcagagctggaactacaatattttttcagacttcataaccaacaaaatatgtatcaaatgtttcttgggcattttattccccaccaccaccaaaacaagccatttgtactactgaatcacactatagccaaccagttagccagaaaatttctcagcttatcagtaagaacactgagaggttatgacagccatagtttaggggcatgcagtattagggacagaggcaaggagttgctcaagctcagcagatactaatgctcccctcaagtaccttacctaaccattacccaccgatgtcactaaactgcccttcgtggtggtctaatattacccataacccttacttccacttgagatggtcaatggctcacacagcaaaaggaaaatttgagatcgacatatacaaactataccttaaaatggtcagtcaagtattgttattctttggtttgctatcattaaatggtggagccacttgactatcccagcagcaatttagtttatctgtcaggcttgtttccctaacttatacaaggtatgattaaatacactaattagagagaggtttggtgtatttcttgagaatcacagtaacttatggaaattttttcaaagagctatggatctgaactggtttattaaaaactgcttcaagcactatgcaaaagcagagactgctcaagtcaatcagaaaaaacaagttcttgggaagaatgagacagtcatacataaaagttctacccaaaactgaaattccaaattctcaaattcctaatcagacaacttagaaaataaccactactagttaacacaagggcttaatcttacaaggtttttttctctaccctaaaaatatcaaaaagtttcttaatcttctttctttcaatccgtcattcatacccttactaataaaataagaggagctccaagagaactggtaccacggagaaaggactgaagacaaatataacgtgtgtaaaggacaggggaaggcagggaagagcttttataacgtggaactgttataaaagcttcctcctcaagtggatgactcttccagttagtatctcctcctacctttgtttctttcaatgctggtaaggaagttaagagctgtgaggagataagtaggaggggaaagaaaagaaaattttttttaatttttttttttttttaagacagagtcttgctctgtcgcccaggctagagtgcagtagcgcaatctcagtgcaacctccgcctcccaggttcaagcgattctcctgcctcagcctcccgagtagctgggattacaggcacccaccaccacgcccagctaatttttatatttttagtagagacggggtttcaccatcttggaaaggctggtcttgaactcctgacctcatgatccaccggcctcagcctcccaaagtgctgggattacaggcgtgagccgccgcgcctggcctacttatttatttttcttttgcttcctcatcctctgtcagagagggaaattttttatatccttttgttttgtggctgataatttgctattatgttttgtaggataaagtataacacaatcctttttttttttttcaatttaattccatttcagctcaaacgttttgcatgcccagaatcattttagccccagaaaacagggataaatgtcactaccaattactagaactctcaggctagcagaacaggaaaacagaaaaacaattaaatttggtaagtgttaaaaaaaaaaaaaaagaaggaatcgtttgaacacaatgaatagcaaagctaggagcctacagtttttagaaacaaaacatacacatggtatctacaagaaactaccttggtggagatgtatacaagaaaacagtacaacttcagttcttggtaatttcttctccactatctttgctttataatgccagcatattgagtgaagggctagcaagaaacaataaagtaaaacatcctatttttaatatataaattgaacagaaaagcatctgaatgtaaattattttatgcgcaaggttccattctctcttccttcttgcacatttatgttccagtttaaacctgatgaagttgaatttaaacataaactccccagagactagagtgctagaactgggcataccaattagccaactcaggtgttagttgcaactggaaacttgctgccaagagacttctcaacctctacatgagcaacagagttgaagttcacagataatacactgtacagagggagttaagggagccaattccatccatatccaaatcaagttaccctctcctgacagcatactaactagccgggtaactcttttgttttaaaggttacattgacttctacaatttaatacactgaatctatctcatatataagaacagacttaagtctgagcttcataaacctgaatttggcttcagtttaaacaacctgttaccagtcatacttcttcctcatcaatcaccaccagcaaccccaaaatgatctttatactaaaagtttttaataaaggtaactgaaacatttcctttatttttaaccttaagtcactaatttttttttaatctttcccacatcgcttttccatctagaatattcctgcccttcaagattaatttgtcacctctggtaaaaccatccccgactctcccaattagacaaaagttttcccttctttatcctaagcattttccatatttttactataacattttacatattacactatttctgtctctgcttcctaccttgtaagctctaaaccattgtgtaaacttgtatgtaactctattttttacaaattttttttttaactaccaccattcctcttctcttttcaaactccagttctcctttgctttcccatcagctgtacttttgaccaactccacatcttcttaaaatacagagaaggttctccttttacagaggtaaaaagaaataatttggctgggtgtggtggctcacacttgtaatctcaacactttgggaggccaagatgagaggacagcttgaacccgggacttcaagaccagcctgggcaaagtggcaaaacgccgtctctacaaaaaatacaaaacacttagccaagcgtggtgacgcacacctgtagtcgcagctactcgggaggctgaggtgggggtatcacctgagcccaggaggcagaggttacagtgagctaaggttcgcgccactgcactccagcctgggtgaagggagtgagaccctggtctggaggggcagaaggagtggggcttttttattttgttttgttttgtttttgagatggagtctcgctctgtcacccaggctggagtgcagtggcgcaatctcggcttactaaaacttccgcctcccagattcaagcgattctcctgcctcagcctcccaagtagccgggattacaggcagctgccaccatacccacctcatttctgtattattagtagagtcggggtttcgccatgttggccaggctggtctcgaactcctgacctcaggtgaccaacctaccccagcctcccaaagtcctgggattacaggcatgagcccggccgaggaggagattttttaaaccccagtattgtgtaccattttttacctctggggtttgtagtttaattttcctttgacagacataagtatctctacatcaaaagtagtacttatacctaagtttgtccctgtggcatataatgaaaataaaaacagcagaggaagaaagagataaataaaaaccaagggttttagccatgctaaggtaagtgagaaagaactggataaagaagagtggtgaggagggacagtgggtatgtgcacagagcagaaatgaaatctgatataaattaaattaataagcaataaagatgtaaaggagagatgatcacagcatatgccccattctcttctaatctattctttccatctacctcacagaggaaaagacagtattgagaagtaaatgttaaagcttaagagatgacaacattagccacctggtaaccaaacagctgagagcagcaaggatggtacataaagtgtaccatggtacactaagtaaacaatgaagagggggaatggtaaccatggtcaaatgcaagacagataaatattcctaaaccagagtgcctgtagagtaaaaaacaaaataacaaacttcccactatagtactaaagttagccctgtccagcaatatcaaaaatagaggctacaatgagtttgttcacctgcaacactgatgttacaaaaattaagactgtagaaataaatgtaaagctaataaaagacttttgggttgatttttcaaagaaaagatattgaaggtagaacagagagatgtccttcttataaagcaaagaggttggagcagatctgtaactctagcaacacgacacggcaagtctgactcacaagacttcctgaataggtcatcatctgtactgctgcttagtctgtggctcagtcctttttttcctgacctcacagcttattactcttcagtaatcattaaataactttaaattcaaaagaatccttttttaaaaatgtttccgggccagtttcagtagctcacacctgtaatcccaacgctttgggaggctggggcaagaggattgcttgagcccagcagtttgagaccagcctgggcaacatagtgagattctgtctctgcaaaaaacacaaaaattagctgggcatggcagcatgtgcctgtggtcccagctatttaggaagctcaggtaagaggatcacttgagcccaggaggtcaagtctgcagtgaaccatgatcaccgcactctggcctgggggacagagcaagatcccgtctcaaaacagtaacaataataatagtttccatatccctagaagttatgtgtctgataatagaatttgtcttttcaaataaatctctaaagccattattcatctgatgacaacaatacaaataatgaataagaaaatatatatcaaaaagttaaaaaataaaaaaagctttcaacattatttgctttctggagggtggggtagcactggtaaaaaggttaaaaggtatcagaactgaaaactcaataaaacccttgaccctctccattcctctccaaaaaatagctaccgtcttatgtggagctaaacatttataccattaggtcaagattgcttcagggaagaaatgtgcagtaagcaaaaatataaaatactgcaaagaggaggagaagtacatcattcaatttaaaatacaacattaaaaaataaaaataaaaaataaaatacaacatagcttggttttttctttgttgctattcaaatgttagtttcatgatccataactttttttttttttttgagacggagtctcgccctgtcacccgggctggagtgcagtggtgcaatctcggctcaccacaatctctgcctcccgagttcaaggaattcccctgcctcggcctcctgagtagctgggactacaggtgtgcaccaccacaaccagctaatttttttgtattttagtagagatggggtttcaccatgttggccaggatggtctcaaactcctgacctcgtgacatgatccataactttaaagaactttttttctgtacttcacaaaacctgcctatccatgtctagtaaatgaagctgggggcacctcattattattagagaatatctgaggcaagaaaattttattacgaacttctgtaaaatcatccatacacctaaactggttaaaaccaaaacctacttcaccaagtatcttaagagtggtcactgttcaacatatcgggtgtcatccacatagaaaaaggaaatagtatcccctatgctaagtgcttggggtagatgaattgttgatcaaaacaggaatttttttgccttcaaggagctgatgactcggtgtgaggaattaacaaactagtaagtagatcatcagaaattgtattatatgctacaaaacgtctttatttaaaattaatggccgatttgtgattcagaaacagaaacaactgagtaccagacatatcctataatgttatacagctgttcaaagtcctaaatctctatagtagatatgtttcttactaataaaagaagtagattcaggttaacaactaaatgcccctgaaattggccaaacttcagattggttagctcagacctcctccgtatttaagcagcacagaatagaggcagctgtagcaggaactgggtgtgctacaagataccaaatacaacaaggtgaaaggtttaagtcaaatgcttctagagttccaaccaaattcactagatttcaagccttttgatctcaggattcctttacctcttaaaaactggaaacctgtaataacttctgctatgtgggttatgtcagtattcaccatattagaaattaaaacttaagaaacattcaccttttttttttttttttttttggagacagggtctcagctctgtcacccaggctggagtgcaatggtgtgatcacggctcactgtagcctcgatctgctggtctgaagtgatcctcccacctcagcctcccgagtagctggaaccacacgcatgtgccaccatgcccagctgatttttttaatttttagtacagaccaggtcttgctatgtttcccaggctggtctccaactcctaggctcaagcaattctcccacctcggcctcacaaagtgttggaattacaggcatgagccaccaagccggactcattcacttttttggtttatttgttttgttttgttttttgagatggagttttgctcttgtcacccaggctgggctggagtgcaatgccgcaatcttgactcactgcaacctccacctccccagttcgagcgattctcctgccccagcctcccaagtagttgggattacaggtgcccgccaccatgcccggctaatttttgtatttttagtagagacagggtttcaccatgttggccaggctagtctcaaactcctgacctcaggtgatatacctgcctggcctcctaaagtgctgggattacaggcatgagccactatacctggccctcattcactttttaaagcccatcatatattaacataaataacaatttttgcaaaaaacaaaacttctgaaacaatgagaattataaaataattaaaaacatatatttgcatataattacctgacttaatagaaaacagttatttacttctgcattcaatccggtgcaatgttatcttgatttaaggatataaagaaaatctggcctcacaaagacatgtacttgtaaaaggaaggactattttaataaacttttataaataattatggatatttcttgatattacactaaaacaactggtaatttcttaaaggtgagttttataggagagaaaaaaataatttttcctctaccctatctgagttctaagttgggtcagaccccttaacaaaagacaaattaacaagagaaaatcagaaatataataaatatatctcatgtatccatgagagatacccagagaaatgagtaaatcttttcatttctaagaggtggcttagaattcagacttaaatatcatcttcagctgaaacaaataaagaagggcacaggggctagggagcaatagttatggagaggtgaccaagaaaagcatggtaaacaacagtaaggcttgttatacagatttaagtctatgccttctccattagtaagtttctagtgattgagtcatccttttcctggtaatgaggaagacacccttacaagggagatttcctttatagatataaattttcccttacaaaagggtaacttctactctgttttcagaacttctcctgtgtctgcttctcaaaataatccttacaccaaacaggcatattttagggtggtatattctagtctcctacagttgcaaagtggaatctgaaaccatataaatgaattttcatgctgtctcattaaaatgcattggatctaacttgcactctgaacagatctttaacccatgcatcactgtataatcaaacaccgggtcatttagataatactggttcactgagttaaagtagatctttcaaatgctggtacatttcattacacaatttttttaacccacattcattaatgtcaccacccatctcatcaggaaagtaataaaaggctgttatgctcatggtggccgattcaagtttacttacttataatttcacttgaagctcaaattttatcactgtcaaccaatacagtcagatgttttccctgtagtgacaggttcacctcactcaatttgaagacagtctccaaataaccaagactcaatagccatggtttgtcactcatccaagtaaaaatggtgttccatgaaaaaagtgggtacttcagttcacaacgcaaactgcgcaagtgcttttcccggagacagccatcatactttggcaggcagaagtctttgtgcacattttccattctcatcacacagaacattaaaacgacagtacttaagggtacagtgaaaggtacttaaggaaaaaagggaatgagggccaggtgtagtgttgctgcttcatcatggacaatcctcagtggaaaactgatttttttttttctttatgagctcctggcagtgaagaatgcaatgtctacctaggagcggagtctggcgccactgccttaattcatggtaaggtgtcagcaattttatgcatcaccgcatttccaccatcggtgcaaacaccaacgggatgaaaatagcaaataacacattagcattattatgagaatagtcttaaccatgtagaacccttaaaaggttctcagagactaccgggagtccacgcaccacacgttgagagccactatattagattaaggttggggctgagagcctgaaactgggtctggcttctccaagataccccacgttcatgtaataaatgttttagggccaggagcagtggctcatgcctataatcccaatactttgggaggctacagtagagggtcacttgccagaagttcaagaccagcctgggcaatgtggcaggacactgtctctacaaaatacaaaaaaattagtcaggggtggtggtaagtaaataaagcaagtaagcagataagtaagtaaataaacagatgctttagtatctactatctgcaggcctatataaacaagccatgttgtgagatcaaaagaacatggagacttcctgaaaggataacagagaaatgctgctatcaatcaacaccaccttatcccattgctccaaatataataatgacagataaaatacgaattttgtattaacttcaaaagacacagttacgctcaaacatgacaaatatatttgtggaccatgacagaggggaaatataaagcaataaattaataactccatgaacccaactgagctccaggacaagaaacaagcaaaggcagtcaggaaatgaaatcatgcacaagataagaaaaccaaaagcaaggctcacaggtaaaacgaaaaaatctcataggtagaaaccaaacaaaaaactcatgaaaggaaggtgaaaaaaggtattatcaatagctaaagttattatttcaaactgccacaggcagttgtagaggaaataaaaggtactctaaataaataaaaggtaatatatacataataataatatatatatgtctcatacacacacacacacaaacaaaacctaagtaatgcatatcaccaacattgcaataatatctcagaattagaatcctagatctagactgaaagcatggtgtaaatgtatgaaggcaacaaaaacagaggtataggtggcagggagacatacagaaaagaacaccaaaataaagggaaaaaaattatttcccactcagcatataaaccataaactaaaatcctaaagtgtatttaaaaagtgaactaatgggccaggcgtggtggctcacgcctattatcccagcactttgggaggccaaggcgggcggatcacgaggtcaagagatcgagaccatcctggccaacatggtgaaacactgtctctactaaaaatacaaagattggccgggggtagtggcatgcgcctgtagtcccagctactcaggaggctgagggcaggagaatcacttgaaccttggaggtgaaggttgcagtgagccgagatctcgccactgcactccagcctgagtgacagagcaagaccccacctcaaaaaaaataaataaaaataaaaaataactgaactaaggaagatagtcaagaaattcatcaatatcaaaagatgaattcaatgcttaataaaaatcttgaaattggtttaaaataaatgtttatgatccttaatgagataaagaattggccaggcacagtggctcaagcctacattgccagcactttggaaagctgaggtgggaggctcacttgagcccaggagtttgagaccagcctgggcaacatagcaagctcccatctcgatttttaaaataataattgaaagccattacgaatgataaaaagaaacagaagaataaatggatgttaaaagaactataagctttcacgaattataaataatttgaaaagatagtatcatcaattatccacagccaaactctagacagacatgggatacttgtctgaaaccaagaatcaatagacaaggttaattcctaaactggacacacaagcacacatcattagtgaacaagaaaacaacgaatccaacttaaatgaagcatagtgaagaggggaaaagaacacagacttaacagctgatttgagctcagcatgaccttaccaaatttacatctctgaagctcaatttcatcttctctaaaatgcacatccatcacctttacaaagttgttgagaggattaaaaaccacaggtaaaacaaaacctcagtgatgtctggcaaatggtaggctctcgaaaaatggctccctcaagaactgtaccatttacagacagaatcaaggtaattaagaaaaatggaatttggcctcttaactacaaacagatctacaacctagtttacaaaaaaagatatttgtgttttctaattcctatattactgatacagacaggagacagggaaatactgggtagaagaaggcagttccctggcaaaggccccactcaagcctgaaaacccatgaccctaaatgagaacaaacattcctgttttcatgcctaaaagttgccttttgacccaccacgcccccatatcctgtacccatataaaccccaagcccccggctccacaaggagacaaacagaagagcagaagaatggcagaatggcacggcagagaaagaagagaaggaacatctgaacaccaagaggagttcggctgaggacggtcagagaggagatgggccactggatggccaaattccaggggaagatcattttcccactccatcccctttccagctcctcatccatccaactgacagccaactccatcactcaataaaatccccacattcaccatcctcaagtccgtgtgtgacctgattcttcctcgatgctggacaaggacctgaataccaagaaggccctgagctgtttaacacttaagccgtccatggtcggcaaagcaaaaagagcatactgtaacacatgcctacttgggcttggggagttgcagactcccacccctggacactcccatgagaacagagcccaggggcactcgccccagatcctgcacctgcctgcacgcatgctcctcctcccaaaaggggtttgagagcacggaacagatgagccacagccctgtcgcacgtcctgtgaggggggtcagggaactctcccatttaattagctgaataaattaagcaaattgtctaaatcttggtgcctacaggagaatttaagagatgtctcttgagaaatactaaattctcaaagatgctaagatcttcaaatgaagttttggtagtggtcttgaattgttcttatggcacttaaaatgttttctaaaaacctctctgatatcatacacttctctgtcaaaagaatttgtagaaacggaactcttattaggaaaggcatttgggttacaagtgactaaggattacttcttccttgaaaaatcatgttaacgttcataacttatcgctctgcaattttttttaatctaaagacactggcaatttagcctaaaaaaaacccttcactattcatcactcttaataagatggcttcctttccaactgccaaaaggaaaatggaaagaaactcaggcttctcatatttcaaataaaattaagagagagctatttaagtatggaaacaccaacagtttagatggtaccttcacaccacaaactagacttatcaaaaacctaagtaaaaattctcatacacaaaaataaatttcaactttcttctcagcgcctaggaatcaaagccttaaactactgaatcatgtctggaaatgaaaagacagtaggattacagctgtgcatggccaatttatcttctgaagtcaaagcatttctcctgttaccttgcagcaagtcaatgtgatctgcatataaatatattaaatggtcacagtatctgaaacctataccaaccacaaaaggtgttattttaattaacaagttggcaacattatgagctttacagttttattctagaattctttttgaattatcacaatttaaagaaaatttttaaaggctaagaactcagactaacaattatgccattccaattctatttatgtcaccctccagtaaaatagccctataaatagcttggcaaagagaacagcaatataacaatagttggtttagaaaaaagttaatttctaccatttagtcttctacaacaggacaaaattttatggtaatgaaattaaagaagggccaaatcaaacactatataacaaaagggctatctggaatgtgttacattatttgtaatagcacagaaactataaaagataaattccatgtaaatgaatgaagtagcctgcattgctgatcttccaaatgcttgtgtactcatataagtttaatatattgagctcattaaagatttacacttagtttcttatattaatgataagcaatacatgatggaaaatatatttaaagcttaggaacatatgttgagcatgtgtgcacatgcaaagctttcaaagttgctttaaaatgtgaaaatgaatatggctccccctgttatccttgataaatgtcagctgtcatgtactcatgtccaatacatactatttttcacagagcagagacccagaaaacgcaattttgaacccaccagctgcatgtaatggttatacataagcaaattctatttgaggtcagaagtttaaaggttttcaatatcaacttctaaataatgcaggctttatatgttaaatattacacagattcaaaagcatactccaattagaagtttttggaaacagacaaaatcgtaagaaggcaattactctaaaagtttggcacatgagataggctcatttataacagtgatacaaactggactatttgtacagcagttcaccttttattagattattgagctgatatttaggctaattctatttcttaattaagttacaaaattaagtactataaagctatattattaccgatctaacgattttcatgtctatatctgaaagcttagcagaaagtaaaccgccataacctttggtctttgctatggtttgaatatagtttatctccacaaaactcatgttgaggcttggtccgcgatgtggtattcggaagtggtgcctttaagaggcaagtaagtcgttaagatggattaatgcctttctcactcccttgagttcttgctcccacaggtttggactaaagagtgggttgttacaaagtgagaccacctcttgtgttggtaactttgcacatgcctgcttccccttcctcttctccaccgtggtgttacgacatggcacaaggccctcaccagaagctgaccagatctcagacttcccagcttccagaatcatgtgctaaataaacctttcttttataaactacctagtttctaaccctagaagaccagaacactagaacagaacaccagaaagcagactaagacattctttgactttaataataaaatacaattatcaataggaattgtcttttgaaagcatcccctgtatagtatgtgacctatacttaaaataaattaccttttacagtaagttgtcatatgagcaacactaaattcaagatacaatttttgaattctatctttttttttttttttttttgccagggacagtggctcatgcccgtaatcccaacactttgggaggccaaggagggcagatagcttgagcccaggagttcgaaaccagactgggcaacatggcaaaaccccatctctaccaaaaatacaaaacgttagctgggtgtgctagtgtacgcctgtagtcccagctacttgggtggcttaggtggcaggactgagcttggaaggcggaggctgaagtgagccgagatcacaccactgcactagagcctgggtgacagactgagactccatctcccccaacccacacgcccgccaaaaaaaaaaaacacatttaagcttttaaaattataaatgcggccatgcgcggtggctcacgcctgaaatcccaccactttgggaggccgaggcgggcagattgtctgaggtcacgagttcgagaccagtctggccaacatgatgaaatcctgtctctactaaaaatacaaaaaattagctgggcgtggtggtgggcgcctgtagtcccagctacttgggaggctaaggcaggagaatggcgtgaacccgggaggtggagcttgcagtgagccaagatcgtgccactgcactccagcctgggcaacacagcaagactccatctcaaaaaaaataaaaataaaaaaatatatatatataaaatatataaaatacacacacacacacacacacacacacacacacacaaaggaagtgagagaattagccatcagatcatctcaagtaaaataattggagcttttctacttgtatatactgcacttaactaactagtcctaaacagcagatccaccaggattatgaattttttggtgaattttttttaaactgtagttataaacttgagagcaaacattgatttctggaggcattgcgcaagatagccataaatatctcacaaatgtttagtggacaaacaggaagtggagatggatctgggtatggtctttttaagaatgcaatcttttcaatgtaaactttcttgacacatgaaaaagatatgctgctggaattcatattgaccatataattacaggatgacctctataaaaagactgaataaggttttttaaaatttgaagtgagtgcaattaacatcttatttttgaaatctaacaatgtttgagataggaaaccttttgagatcagtgtcatgaggaaagtaatatttttccataaaatttctgtatgacatcatagtgttcttagcagttttgcatacatcagctagattctttaacagctttactgagatattaattcacatattatatgcttaaagtgcacgactggcttttagtatatttcagagttgtgtaactctcactgtaatcaattttagaacattttcattatcccaaaaagaactcaaaatcccttagctgttattcccccctgctcccattcccaccccctcaacctcatataacccaaccttccacctattcacccctgcccttgacaaccacttacgtatttgcgtctttatggatttacctattcaggacatttaatataaatggcatcacacaatatctagttctttgtgactggcttcttttacttagcatagtgttttcaaatacatcaacattgtagcacatatcggttcagtcatgcctagcttaatgacagggatacattacgagaaatgtgccttcattccatttcatcattgtgcaaacatcacagagtgtcccttaacaaacctagataatacagcctaaatctaggctatatggtatagcctacagctcctacgcaacaaacctatacctatactgcatgttaatatattgaatagcgcaggcaagtgtaatacaatggtatttgtgtatctaagcatatctaaacatagaaaaggtacagtaaaaatacagtataatcttatggaaccactgtcatatatgtggtcctattccttcattgactgaaacattgttatatgctacatgactgtacttcattgctttttatttctggctaatacttcactgtatggatacaccacattttatttatgcacctatcagctgatggaaatttaagttgttgttctgctactatgaatactgttgctatgaatatttgtgtgtaagctgtgtgattatgtatattcttaaatgagaaatcatgagcactaataataaaaataggtttcagccaggtgtggtggctcatgcctgtaatcccagcactttgggaggccaaggcaggaggatcacttgaggtcaggagttcgagaccagcttggccaacatggtgaaaccctgtctctactaaaaataacaaaaattagccaggcatggtggcacgcacctgtaatcccagctactcaggaggctgaggcaggagaaccgcgtgaacccaggaggtggaggttgcagtgagcagagattgtgccacggcactccaacctgagcgacagagcgaaactccatctcaaaataaaataaaataaaaacaggtttgataatacatgtaaatgatgcttccaaagttcgctagtaaacagtaaagaagccaggttcttttttttttttttttttttgagacagagtctcgccctatcgcccaggctggagtgcagtggcgtgatcttggctcactgcaagctccgcctcccacattcacgccattctcctgcctcagcctccagagtagctgggactacaggcgcccgccaccacgcctggctaatttttttgtattttttagtggagatggggtttcattgcgttagccaggatggtctcaatctcctgacctcatgatccgcccacctcggcctcctaaagtgctgggattacaggcgtgagccaccacgcccggcagaagcctggttctttaaaaacatttattctaaaaatctaaaaaccaatcatggaatcttaactatgattaatatgttaacgggctctaatggggaaagcagacaacatgcaagaagagatgggtaatgtaagcagagagataaaaactctaaggaggaatcaaaaggaaaggttaggccaggtgcggtggctcacacctgtaatcccagcactttgggaggccgaggccggtggatcacctgaggtcaggagttcaagaccagcctggacaatatggagagaccctatctctactaaaaacacaaaaagtagctgggcttggtggcgagtacctgtaatcccagctactcgggaggctgaggcaggagaatggcatgaacccgggaggcagaggttacagttagccgagatcgcaccactgcactccagcctaggcgacagagcgaaactccatctccccctcccaaaaaaaaaaaaaaaagcacaggttagaatcaaaaaagactaacagaaatgcaaaatgcctttgatgggctcatcagtagaccaaacataggagtgggagaccagagagccttaagatcaatacaaactccccaaaactgaaaaagaaagagaaaatgaaaaagaaaagaatatccaagaatggtgggacaattataaaaggtgtaacacacacaaaatgggaatactattcacatgaaattttagaaaaggtaaaacagtagtgacataaagcagaccagttggaggtttcttctggttgctagggaccagtggagatgactgattgcacagaggcacaaagaactttagggaatggtagaaatgttttatatcatgactgtggtgatggtcacatttgtcaaaactcattaaattgtaaatgtaaggttggtaaatattttgtatgtatattatgctttaataaagttggttttttgaaatcaagtacttaaggaaaattacagtgcttattgctaatcctatgataaataaaaagtgatatgaaataacttagctaataaaacaagaaacaatgtataaaacatttcagtaagaaaatttacttttggcttagtatggtgcctcacacctgtaatcccagcacttcaggaggccgaggcaggtggatcgcttgagctcagttcgagaccaccctgggcaacatgttgaaatccccatctctaccaaaaatgtaaaaatattaattagtcaagtgtggtggcaagcgcctgtagtcccagctactcaagaggctgaggtgggagtatcgcttgagactgggcggcagaggctgcagtaagccaagatcatggcactgcagttcagcctgggcaacagtgtgagaccctgtctaaaatttaaaaaaagaaagaaaatttactttttctaaagtagtaccaccacattgaaagcaaatatattagcagttaaaatcaagtttgtttaaaactttagagcaataaaaatattttaaacgagatacaaaaaatgatcattgcaacgttgttcacacttcaaaagctagaagaaactctaatgtttatcaattgcagatttgaaaaatgaattctaatgaagccatgcaaaagaatacaatacagggatggtaaaaatgaattatacacaacatggttggatcttacaatttagaaagccaccacattacatccattatatttttggaaagctaaaaaaaacaagaaaactaaacattgttcaaggacacatccaaatgagactttttcaaagttttttaaatgaagttaattattaactcaaagatagctgtgacttcaaggatagaagcaggatgacttcgggaagaaagattcagggagcaggtacactatacgaactgaccgtcccgttcttcagttcaaggagtgggttcaagaatagccttcaaagtatacttcataattcaaataatatatactctttatttatataaaaataatgtgtaattttagtgtttaaagtaaaaaatcactatgtgaacaaatacttgctctaacatctgagtgaggtattgtgataaatgcattccacttattactcccatttaatcctcctgacagccctatgaaacacagaatagtgagctagatgaaagtacagttcaatattatccctacttcacttgaaaacactgagacatcgaaaggtaaactcaacccaaagtcatacatccagtaagtggtggagctagaaattaaatccaagtcattctaacttcagagccaagcttttaaccaatcccaccaaaaaattaaaaaaaaaaaaagccttatgtcatggcatcaaatattttatttttttcatggaatctcagtaaagccacatcacttacagctattctaacagtttagatagaactggccttactggacttccaataataaatcactcttttccagccacaccaagtggaagatcccaccagtctaaaaaatttaaaaccagttataaatcacggtcctttgcaagttaagcgccagccaaggactgtagattcttgacctatccctatagatatctcctgtaaaaaattattttaaggccaggcgtggtggctcactcctgtaatcccagcacactttggtaggccaaggcgggcggatcacctgaggtcagaagtttgagaccagcctggccaacatggtgaaaccccatctctactaaaaataaaaaattagctgggcatggtggtacgtgcctgtagtcccagctactcagggagctgaggcagcagaatcgcttgaacccaacaggcagaggttgcagtgagccgagatggcgccgctgcactccaactagggtgacagagtgagagtgtctttaaaaaaaaaaaaaaggtcattttaaaggctgggcgtggtggctcacacctgtaatcccatcactttgggaggcaaaggcaggcggattgcctgaggtcaggggatcgagaccagcctggccagcgtggcaaaattccatctctactaaaaatacaaaaattagccagtcgtggtggcgggtgcctgtaatcccagctactcaggaggctgaggcaggagaattacttgaactcggaaggcagaggttgcagtgagctgagatcgcggtactgcgctccagactgggcggcaacagcaaaactgtctccaaaaaaaaaaaaaaaaaaaaatcaggtattctgcccacctcagccttccaaagtgctgggattacaggcgtgagccaccgtgcccagcaatatcatgaagactttcatcttctctttttttttttttttttttttttttttttttgagacagagtctcgctctgtcgcccagcctggagtgcagtggcacaatctccactcactgcaacctccacctcccaggttcaagggattctcctgcctcagcctcctgagtagctgggattacaggtgcctgccaacacgccaggctaattgttttgtatttttagtagagacgagatctcatcatgttggccaggctggtttcgaactcctgacctcaagtgatctgcccacctaggcctcccaaagtgctaggattacaggcatgagccactgcacctggccaagactttcatcttctaatctgactggttatcacgcatcttgagtggtgtaacagcagttagcaggtaactaaaaggttccgtaatgtagaatctgatccgtcaatcatagaaaattaaagctggaaagaacctgagattatgtgtaaaacaagtgaactggtcattatgaagaaaatgatgccaagatgagactactactcttcctagttcccatctggcaacatgtgttttctggctttaaatatgagaggtgttatatccaaggcaaaatcaacaaatgttgatttttatacataaggcaatacaaacctaaaaacaattcacttaagttgtttggtttttaagtaatcgttgccttataggatttctatgaatttggttcatattttaattagaaggcatgaatgcagaatttataattaaaatgtttacctttaaactttagaaatttaatttcaaaataaactgaaggagaaatataaatatacggttactacaactaagaatgtcattcttatgccagtaattcttttcccatactactaattatcttataaggttctaacagaactttagaaactagaattttaggaaaatgtttatataaaggcacttgataattatcctggcttagtaatgctttcattcctttaccaaactttataatgttcttattttaactaagatgacacaaaaactggtttaaaaattttcatgaagttaaatccatcaacttggccaggcgcagtggctcacgtctgtaatcctagcgctttgggaggccgaggcaggcggatcacgaggtcaggagatcgagaccatcctggctaacatggtgaaaccccatctctactaaaaatacaaaaaaaattagccgggcgtggtggcgggcgcctgtagtcgcagctactccggaggctgaggcaggagaatggagtgaacccgggaggtggagcttgcagtgagccgcgacgcaccactgcactccagcctgggcaacagagcgagactgtctcaaaaaaaaaaaaaaaaaaaaaaaaaaaatccatcaactcaagaggaggtactccaaagagttaatttccgagacaatgaatgataccgcagtctgggattccaaagtcttgattttaaaacgtatgtggtggccgggtgcagtggctcaggcctgtagtcccagcactttgggaggccgaggcaggtggatcacctgaggtcaggaggtcaagaccagcctggccaacatggtgaaactccatctctacaaaatacaaaacattagcagggtgtggtggcggatgcctgtaacccgagctacttgagaggctgaggcaggaaaatcgcttgaacctgggaggcagagattgtagtgagaggagatcacactactgcactccagcctgggcaacaagagcaaaactctgtctcaaaaaaacagtctgtcattagaattaaatttttctgttgagtaaccacagacatactttcactgctggaggaatgtcatctaaaaagattagttcaaggtattactgacttcaggatacttaaattcttcaactgaaaaccgttttttaaatgagaagaacttcaattttctgcaatttgacaatgttgttaattaagtagcatccgctaccaggaccaccactcacaccagttacagtatgaacattttaactgacagcaacttattagaagataaagatcatggcattatggaaagaaaatggtctgtagtttgtaaacaatcaagttaggttctaatttcagttctgccacaaactaggtatataactttgataaacctgttaccttttctgaagcctctatcaaccccaacacagggctgtaggaatgaaataagaggtaaaagtatttcattgttgaatagtgcttagaaattgagttggcagaaaaagtcactgaacttgaagggatatcaaaagaattatccaatttgaagaagagaaaggaagaagactgaagaaaaatggttagaaccttaatgacttataaacatatcaaatggtcggctgggcctggtggctcacacctgtaatcccagcactttgggaggctggggcagatggatcacctgaggtcaggagttcaagaccagcctggccaacatggcaaaaccccatctctactaaaaatacaaaaaaaattagccaggtgtggtggcaagcacctgtaatcccagctactcaggagctgaggcaggagaattgcttgaacccaggaggcggaggttgcagtgagccaaaagagcaccactgcactccagcctggggtacaagaacgaaactccacctcaaaacaaaagaaaatcaaatggcctagcaagtatgattggagtcccagaggaaggagaattaaattgaagcagagatgcagaaaaagtacttgaagaatggccaaaactttccatatttgatgaaaacacaaatttacaaatccaagaagctcaaagaataccatgcaggataaatacaaagaaaactagacctaaatacatagtcaaactattttaaaccaaacgtaaaaagaaaatcttaaaagtatccacaagaaaaaaagaccacacatactgagaacaagattaaaaatcaactcttcaaaaaaaaaaaggggaggaggttacaacaccacagaacaactttaaagtgctgaaataaaaaaatcaacaacccagaattttctatccagtgaaccaaaccttcaaaaatagggtgaaataaagacattttcagataaataaaagttgagacaatcagtgataaacaattctggaaatgaaattatatccttcaggccaaagagaaaggggcatcagatgaaaatgcacatctataaagatgaatgaagagtaccagaaatgtcttactgtcaaatgggtgatggcttctgctactctccgatgcttcccttgaggactcatatgctataatttgtcttcaaaggacagttgaagattctcatgcaaaagactgtacaaagtacctttaaatcttgataatttatgaaatactctgggcaatgaactactgagctaacatttttaaattttaaaactatactaaaggccaaaatgtctaggtatcttaaacatctaagcagacaacttaaaagtgactacagaataagcctaagagaaacagaattaactgcataggactaaatgaactagtggcagaaatttaaccagttgtttcagactatggttttttcttttgttttttcttttgtcttttgttttttgtcttgagacacaatcttactctgtttcccaggctggaatgcaatggtgcgatctcggctcactgcagcctctgccccctggggttcaagtgattcttatgcctcagcctcccgagtagctgggattacaggcacccatcaccacccccagctaatttttacgtttttagtagagagaggtttcaccacgttggtcaggctggtcttgaactcctgacctcaggtgatcaacctgcctcagcctcccaaagtgctgggactacaggtatgagccaccatgcccagccgttttttgttttgttttgaggcagggtcttggtctcttgcccaggatggggtgcgatggtgcgatcacggctcactgaggcatcagcctcccagcgtcaagcgatcctcctacctcagcctccccagcagctgggaccacaggcatgtgacacacaatgcccagttaatgtttttattttttatttttgtagagacggggtcttaccatattgcccaggctggtgttattttttaatattctgttttctgatggctatatgaggaagcccttttcctttcttcttcatctacctctagctcacaatttaatatattatgcttttgtaggaaaatttttaaatggcatttgagagcggtggcgcatgcctgtagtcccagctactcaggaggctgaggcaggactgcttgagtccaggaattcaagattgcaatgagccacaatcataccactgcactccaggtaggtcaagagagtgagaccccacctcaaaataaagtaaaaactaagtctattttttcatgttaataacgttatttgcataggcttaatcaaattccgtcaagacaaaggtaaataaaatttaccaggataactggacaaatcattgtacaatctaggtcatatactatttcttataattaagaacaatataatgatataatgtcatataattataatataatcgtatgacaagtccaccactataacaaagatagtagggcaggacacagtggctcacacctgtaatcccagcaccaacacttggggaaaccaatgcagggggattatttgagcccaggagttcaagactagcctaggcaatatagtgatacctcacttccacaaaacattttaaataaacatcttataaattaaaaaatttttttaaaaagaaaacaaagattttacattatacaagaagtcaatgtttatgggcctggtacctgttcttggtttacagggactagcttcacagatggaaggtcacttagtggcagccaatgactcagtaaatttagggaacctgaacaagagatgacttcatccaaatttataagtattccaagtgaaatctggtggagagggtattgtatttgtttcctagtttcaggataaaagaacaaataaaagagactttaaaagttcaagtcagccaggtgcagtggctcatgcctataatcccagaactttgggaggtcaaggagggtgtatcacctgagtcaggagctcgagatcaacctggacaacatggcaaaaccccgtcactacttaaaaaaaaaaaattagctgggcttagtagtgggcacctgtaatcccagctactcaggaggctggggcaggagaatcacttgaaccagggaggcagaggttgcagtgagctgagggtgcgccactgcacgtcagcctgagtgacagagcgagactctatctcaaaaaaataaataaagtcctataatcagacaatgtatatgggcatgaggatggcactgaatagaggccagaaagagactttggcaaatataatcaattaatcaagttaccaaagcaaaccaagaaaaaaggaacatcttttctacaaatagccctggaactggatatctataatttaatcaaaagttggtcctctggccgggcacaatggcttacacctgtagcttactcccaagcactttgggaagctgaggcgggtggatcacctgaggtcaggagtttgaaaccagcctggtcaacatggtgaaaacctgtctctactaaaaaaaaatacaaaaattagacgggcatgctgttgggcatttgtagtcccagatacttgggaggctgaggcaggagaatctcttgaacctgggaggcagaggttgcagtgagctgagattgcaccactgtactccagcctgagagacaagagccaaattcagtctttaaaagaaaaaaaagttgtattttatattctgtaaattttactacaattaaaataaatgaatgggaaagatctctttggcatgatagggcattatttccaggagatatcagttaagtaggaaaaaaagcaaagtgcaagagtatatatagtacgctatcttttgtataaataaataaataaaacatacagataccatcaaaaaaaagaaatgggaaggataagacagaaaacatttaagttggttacctaagaaaactgaagaaaaatggcatggaagggatacaaaagcaatgtatgccttttgtataattttgacttttgaaagcatgttattattctacatattacaaaaataaaaatcagaatgggaggcagcataagcaaacaagtaaataaacttaattttgtttcaaatgaataccctaactagtttatacagaaagtaaggtgggaagtaaaagtggggtggaggtcgggcgtggtggctcactcctgtaatcccagcaccttgggaggcagaggcgggcggatcgcctgacctcaggagttggagaccagcttgggcaacgtggtgagaccctgtctctattaaagatacaaaaattagctgggcatggtggcacgcacctgtagttgcagctactcaggaggctgaggcagaagaatcccatgaacccagaaggcagaggttgcagtgagccaaggtcgcaccactgcactccagcctgagcaaccaagactgcctcaaaaaaaaaaaaaaaaaaaaaaaaaaagtggggtggagaaagggtatggagggctaatccaagcaatttaaattttaactgtttactctcggtcttgggtaaaattgggaggtggagaagaattatagacaaatgctccactcattttcagtttgtttattgcagtgaaatgaaaaaaccaattctgaaattattttagatgtattagaggattaggcaaatgagtaaatgtactaaggttgagagtcaggattcccacataataataagggacataaaaataaaaaatgaagtacaaagaaccctgtagacatggaataaagacgtacatactgatataagctcatgatttctaaaatatgtatatgtatgtttcaatgaacacatgcgaagtcggccctctgtatcgtggattctgcatccatggatcaaaaatactcaaaaaataaatttaaaaaaacaatacagcaataaaatacaaattaaaaaatacagtttaacaacaacctacacagtatttacactgtgttagattcttataagtaatctagagatgacttaaagcatacaagaaattgaacatgggttatatgcaaatacaattgctactttatagtttaaagaacttaagcatcagcagattttggtgcacacaaagggtcttagacccaatcaccctcaggtacgaagggatgactgtatgagtatgtatatgtacatgtatgtgtataagcatgcatattatttcctagctctatccactaaaaaggccaagatgagaaaacagcccagaagtagtgaggacacctagcactcagagagatcttggtctctaaaacttttattccccacaaggacacagcggcccacttacaggagtttcactagccaaacttctaggacaatttgagcactaaaataattaagcagggtaagtgaattgtaaaccattcaaaaaataggaattcatgaatccatcaccaatacatagggctattgattatggaatacagccaagatccgacgggtaatgggaaaggaatgctggaaagaaaaaaatgaccattttgcaatcatcacaataaaaagctggatcagacaagagtcaatggatgctaaatctagaagaaaccgtgaaaagaatcagaatatctgcattgtttccccacaagctgcttattgcttggcaaaagagagggcaaaaaaaccaaatggtggagaaatctggcaacaccttggccaagggatcaaaatttgcatcacaataagggacagacggacgtcatatgactccatctcagagtatcacattgcggatgcagtattcctgccaagaatccataacatcttaatctaatcacaaggaaatttcagaccaacataaaatgaagaacatctccactgaacagagtaaaggggttagggaagggttgtgttctcaaaaatgccaatgtcataagagataaagacaggctgtgaaaatatcccaggaaaaaggaggccaaagagaaataataactgaatgcagaacctgaccccagactgtagtctatacaggaagcatagaaaatgctacaagagactttcttaggtcaactgacaaaactggaatatgggcgatagatttcatcgatgtccatttatgaagttattaactgtaccatggttatataagagaatgaccctatctgtaggaatacaacagaagtattaggggaaagaagcataacatatgtaactcaccctcaaatggttaaaaaaaaaaattgtgtgtgtgtttacgtgggtagaaaaagagaaaagagagtaggacagcacaaatacaaataagcaagtgggtaagtctggataacggatatccagatgttctttatactatatttttgtaacttttgtaaatgtatacttccaaataaaaggtatttaaaaaagaaaaaattggccgagcacagtggttcacacctgtaaccccagcactttgggaggccgaggcaggtagatcacctaaggtcaggagttcaagaccagcctggccaacatggtgaaaccccgtctctactaaaaatacaaaattagccgggcagggtggcgcgtgcctgtaatcccagctactcaggaggctgaggcaggagaatcacttgaccctggaagtggaggttgcagtgaaacaagatcgcgccattgcactccaagctgggtaacaaactctgtctcaaaaaaaaaaaaaaaaaacctgtggagatagttctctgccatgttcagaagaatgggtatatatcacaattaactgagggattttacagggaaattgcaagacctaaggctggtaacttggatagattctcagataaagtaccatttgaaatgtcagagaagggagtttgtactttttctttctgtaagccaaggaaaggtagcacaaaacttagagcacaacataagcttggctaaaagtatacatttaggaaaatctagctaaattttaagtgagtggacaaggaagcagtagagacaaggaaaaacaccctcatgaaattatggggtcttggcctcggaagctaaaattaggaacagaaagtggaacaaatacaggacacatgaaaatagaaagccagataaagcctgcttaccaaatgaatcagagtacggtgggattcaaagacaactcagatttcaaacctagctaaccaagagaatgatgggattaccaaaagaaatttagctaagcaaagcatgattgttttctcggcaactagacagctttttctattctcatttttcctattctgatgtaatattaaaagttaagaaaaggggccaggcgtagtggctcacgcctataatcccagcactttaggccaaggcaggcacgtcacttgaggccaggagtttcagcctggccaacatggtgaaatcccatctctaccaaaaatacaaaacttagccggatgtggccgtgcacgcctgtaatcccagctacttgggaggctgaggcatgagaattgcttgaatccaggaggcagaagctgcagtaagccgagatcacaccactgcactccagcctgggtgacagagggagtctgtctcaaaaaaaaaaaaaaaaaaaaaaaaagttaagaaaggggttagatgaaatgttatttgccagcacaagcaatctggggaaatttgtcttcacaaggtgaaacagcaaatgtaagttaggctaattcagatgtttgactaaatgccattaaaatattcacacataaggagggggaatttcttctcttcccccaaaattatgtttgtatttgtatgtatatacatatatacgaataccataaccccttgtacaacacatttgaactgcatttgttctgttatacgcagatttttctctatttctgccatgcctaagacagtaggaccaacatttcctcttctttctcctcctcaagcctactcaacctcacgaaaagaatgaagacctttatgatgatccacttaatgaataatatgtatattttctcttccttatgacttttttttttttttttgagatgaagtctcactctgttgcccaggctggagtgctgtagcatgatctcagctcactacaacctccacctccaaggttcaagtgattttcctgcctcagcttttcgagtagctgggattacaggcacacgccactatgcccggctaatttttgtatttttagtagagacggagcttcaccacattggccaggctggtctcaaactcctaacctcaggtgatccacccaccttggcctcccaaagtgctgggattacaggcatgcgccaccgcatccggccatgtctttcctttttaattatttatttatttacttattttctagagacaaggtttcatactgttgcccatgctgaagtgtagtggtgcagtcatagctcactgcagcttcaaactcctgagatcaagcaatctcccacctcagcctcccaagcagctaggactacaagcgcacaccaccttgctagctaattttttgtgtgttttgtagaactgggggtgttactgtgttgtttaggctggtctccaactcctggcctcaagtgatcctcccacctccaatccccaaagtgctaggatc

SEQ ID NO: 23 - DNA, 260209 bp, Homo sapiens
  misc_feature (1)...(260209): n = A,T,C or G
  misc_feature 25891, 27411, 27421, 31218, 185592, 185601, 185605, 185662,190170, 190172, 190174, 193398, 193904, 194384, 195071: n = A,T,C or G
  misc_feature 195073, 195076, 195081, 204349, 204351, 204353, 205272,212872, 212874, 212879, 212884, 212885, 214984, 214986: n = A,T,C or G
  misc_feature 214988, 222384, 226726, 226747, 226807, 228338, 228341,230462, 230540, 242008, 243283, 243413, 243414, 243415: n = A,T,C or G
  misc_feature 243416, 243417, 243418, 243419, 243420, 243421, 243422,243423, 243424, 243425, 243426, 243428, 243429, 243430: n = A,T,C or G
  misc_feature 243431, 243432, 243434, 243435, 243436, 243437, 243438,243442, 243443, 243444, 243446, 243447, 243449, 243452: n = A,T,C or G
gaattctgagtttttgtctatctttattttggccaaattatgtttctaagtaactttttcaggctgatagacatttttttgagaccttgccatatctctgaattgtttctgctgtcttatacatgaatgaaaatttgaatctcttgtttatttactgtttattccaaatattttctaaatttgatgctattgctaaatgaaatgaaatttcattttctgcttatattagatgtcagtgtatttattctgaaaaggcacattattaaatcaatttatgatttagttttttaattgactttttaactttcctgaaagataattctatcatctgaaaatacagaagctcccctttaagaataattcactttcaaaaagttgttcactatctcaaatattattagtccaaactgacaacacataagtaattgctctcagcatccaatggtagtgagaagagaggatgtccttttgctcaggtaattaaaataagttaacatttataatattaggtttaaatgtgtgtcatgcctgcagaaacaaagtcaaatgcaaatgctagcaataaatcttgaaaggaatacaagatataattagattaagttaattatttaggagcaaatgccattgtcttaataaattaaacacatattatttttagtaaattaaacactgataaactactaagttcaggaagaaggataaaaaagtaacagtaagctaagtaactttccaaaaatttgggtacattcttaacttgggttattaaagaaatataattttaagattctttatcttccatatcattgccaaatgccaatgtaatgtatgtttcccatattgtttgggaatgttcagctctggtttagaaagctagcaaaacaaatgggaaaataaatgtgttaagaatagacagttattgagcaaacagcttatgagacatgagagaaactcataagatgtattaattgtagataataagtaagcaagcagcttgagagacaaagacagaatacccaagatttactaaatatatagtaagttagtagccactaacacatgttaaagatagataaaataagtggactatatgatggagcaaacaaaaatgatacttacagaaagagatggaaagaccaagtaataaattatagatcatgttgcctgtagcctgatggctatgtcatctccaaactggccacccactggtaacacctatcatggtctcattctgtccctacttgtgctttgctcaagaaattaaaaaacaaacaaacaaaagccaggactgatcagcaggccaattggcaagtcaccacaggggctaggcatatttatctgtgtctcttgaatacagcaagtcagtgtgttgacaccagataacttccacctgttggacctcttcataatcacaccatcagctgggaggacacgtgagtcaaaaacaaaggatcgctgggcacggtggctcacgcctgtaatcctgacactttgtgaggctgaggcgggtggatcatctgaggtcaggagttcaagaccagcctggccaacatggtgaaaccccatctctactaaaaatacaaaaattagccaggtgtggtggtgcactcctgtaatcccagctactcaagaggctgaggcaggagaattgcttgatcccaggagttggaggtagcagtgggccaagatcatgccactgcactccagcctgggcaacagagcaagactccatctcaaaaaaaaaaagaaaggatcagaagtcaggcagtgttgtcctttcactctgcctacatcctatcctaagtgaatttacctctctcatctcttcccctagcctctcactacgtattttcaagtgatttaataaaaccatgtgatttgaacattttaatttggtctgtgagtgattctgttccatgactgctgggagagtttgcatggttaatatatttgggagtagtgttgcacaaaggtaatttcccatgtgacagtaaaattaagaaaaaatatattaatcactatataaaaaggcaaagtctcaattatgttccataaaaaatctaatcattcaatttacaagttaaacaaattaccatagaaaattaatagtaaatgcttgagcaaaaataaatcaagcaaacatcaatcaaagaaagcatgtttgtaatgtggattgataaacttaagtactagcaaattaactttaagagttcagcaattcttaaatagaaagcccataaataaatccacccacatacagtaaagtgatttttgacaaagatgttaagagcacacaatggaaaaaggatcgtctcttcaataaatggtcttgagaaaactggatatcaatatgcagaagaatgaaattggacccctatgacatacgatatgcaaaaataactcagaatggataaggcttaaagataagacctgaattgtaaaattgctcgaagaaaacataaggaaaaatctgatattttcccttgacattagtctgagcaatgatttttttggatatgacctcaaaaacaaagacaacaaaaacaaaaataaacaagtgagcgcatgtcaaactgatcttctgtagagcaaagggaacaatcaacagagtgaaaagacaacctacgaaataggataatatatttgcaaaccatacatataaaaaaggggttaatatcctaaacatctaagaaactcaaacaactcaattgtaagaaaacaacctgattaaaaaataggcaaaggacttttatagaactgctattataaaaaaaaaaaaaaaagaaaagaaaggtagcaagcgttggcaaggatgtggaaaggggaacactggcaaactgttggtgggaatgtaaattagaacagccattatggaagacatatgaaatttcctcaaaaaattaaaaatagaattacaatttaatccaacaatcccactactgggtgtgtacccaaaggaactgaaattagtatgtcaaagaaatatctgcacctccctgtcaattgcagcattatggttgctcataaaaaccaagatacaggccgggcgcggtggctcacgcctgtaatcccagcactttgggaggccgaggcgggtggatcatgaggtcaggagatcgagaccatcctggctaacaaggtgaaaccctgtctctactaaaaatacaaaaaattagccgggcgcggtggcgggcgcctgtagtcccagctactcgggaggctgaggcaggagaatggcgtgaacccgggaagcggagcttgcagtgagccgagattgcgccactgcagtccgcagtacggcctgggcgacagagcgagactccgtctcaataaaaaaaaaaaaaaaaaaaaaaaaaacaccaagatacagaatcaacctaagtgtccattgacagatgaatgaacaaaaaattatgatccgtatatccatatattggcaatgaaatactatcatatatatgtaatatgtataatagcacatatatattgcatatatacacacacacacatatatgcaatggaatattattcagcctttaaaaacaaagaaatcgtgttgtggatgaatctagaggacattttgctaagtgaaataagccaggcacagccacacaaatagtgcataacctcacttgtatgtagaacctaaataagtcaaactcagaagcagagagtggaatgatggttgccaggagatggtgggggggtgggtggggggaagggaagggaacaatagagggtagggaggatagagcaatattggttaaggggtacgatgtttcagttagacaggataagcaaattcagatttattgattgtataacatgatgactgtagttaataatttattgtatacttgaaactcgataagagggtagatctaaaatattctcagcacaaataaatgttaagtacgtgaggtgatggatatgttaattagcttcatttaaccatttcacaatgtatacatatattaaaacatcacattatacaccataaatacatacaatttttgtcaactatcttaacaaaaaataaaattttaaataaatgcattttttaaaaataattttaagagttcagcagttcttaaatccaccatcatgtgttccaaatctgtgagcaagaaaggaatggatttgcattgaatgtgtcaggaatcacacacaatctgctatccatcttactgacacagtggcctgtggtaagcaactcttcccagtgaaagttatgcctgccttcaaaataccatgtctgtcatgctggaaaaatacaaaagtcagatgcaactgaatgttgagtcagagaaagataagaaaggatcactgtcaggaaacttaacactataaatcatctggaaaaataaatagataaataaatccatgtgaaaatttttacagacaacaaaaaaaaagaaaaaaattttagaaacaacaaaaaaaggtatcttttaagcaactaaacaactaaagtaactaaactaaaaaataacaactgaaatgaaaagctagcattaaaacttctgcaaagtatgttgagtagaacttttctttgtgcatcagaattggtggtgatcacagtctcagttgaaaataaatgatatgaagtactcaaatttttatgatctaccacagttggatccagacaagctcacaaccattcccaccacctgtattaagaagtggcagactctatcctacctctgtcaaatctcaccactccttcttaccctgctcccaccagtcagtctaaggaaagaactagcagaaagagaagggtcatttaggtgatcagtctcatggagttacagaatttatgaaatgagatcttccttcccaagagaggtggggcactgagggcaatcactggaacagactgaagaacctatgagttgggagactggcttctgttcccatcaggaggctcactaagccatagaacatgatctttagtctgtttctcacctggacatttctagagacaagaggcttgctggacaactcaccaaagaagatagtgctgactacttgctctcttggctctctgtgcctcagaagatggcttctgtggctccatagaggtacagatgatgaagatggagcacatcagcagaaacctgtagcagcagatagaccctgaccaagctatagtgaggcccgggagtcactagcttgcccacagtggatgccctatatttcttaaataataagtgaatgaccaaaccatcaaataatttttaaaattttctgaatacagcttataaatctatccatttcttatttttattatactaagaacacttaacatgagatctacccttttaaagtgtccagtacattattgtggactataggtttaagtgactttttgatacacctccaatgagtcttatatttcaagatgcatttcaattttgtatatatttcatgtctcccttcatattttataatttccttgagagtaaggaccaggttctttttttttttttcttttgagacatagtctcgctctgtcgccccagctggactgcagtagtgcgatctcagctcactgcaagctccgccttccgggttcaccccattctcctgcctcagcctccccagtagctgggactacaggcacccgccaccatgcccggataattttttgtagttttagtagagatggggtttcaccgtgttagccaggatgatcttgatctcctgacctcgtaatccgcccgccttggcctcccaaagtgctgggattacaggtgtgagccaccgcgccaggccaggaccaggttcttacttaacctattactatatcctggataccatctcaagctagcgttttgagcagagatactgaagaatgttcctaaatgagtaaatagatgaataaatacctagtgtatcaaatgaccaatacacttgcctgaatcaacttctgctacacactggtcacacattccaagattaatacaattactacttttgatcttatctgtaattttagtagaaaagtttaggaagaaaggccactatttcctagcagcaataatgcccctctaaaaccacccttggtcccatatctccattaagaacctgtcccctctcccactacccttgtactggcaattctccaaagggttgtctacacttggataaggtagttacatttactgtgattgtgtgtgtgtgtgtgtgtgtgtgagagagagagagagagaaagaggaaggaaggaaggaaggaaggaaggaaggaaggaaggaaggaaggaaggaaggaaaaacagttgaggaggaattcggggaagagaccaggtcatgcattcattgggatatgttgaatttaagatgcctctgagacatccaggtgaaattgctgagtgagcaggtatgtggtcatggggttggcttattctaggatgtcctagaatcctgcatccacaaatgtgggcctatcactgcttccaccccaatttccacataatacacatcaaataaatgtttgctgagtcagataaatttaacatttgtcatattatcttcatttcttatatcacaacgttttcttccttttattttttactttctccttgtttctttccttccttcttttctcttgttcttttcttccttctccaacatatatttatttgagtgcctattatctgccagagatcatactgaacctcaagaatataatgtttagcaatctaggcaatacaatgcaggacataggcatggacaaaaatttcatgacagagatgccaaaagcaattgcaatgaaatcaaaaattgacaaatcagatctaattaaactaaagagcttctgtactgcaaaagaaactatcaacagagcaaacagcctacagaacaggagaaaaacgttgcaaactatgcatctgacaaaggtctagtatccaaaatctataaggaacttaaacaaatatacaagaaaaaaacaactctattaaaaactgggcaaaggatataaacagacacttttcaaaaaaagacatgcatgcagacaacaattatatgaaaaaaatagctcaacatcactgatcattagagaaatgcaaatcaaaaccacaatgagattccatctcatgccagtcagaatggtgattattaaaaagtcaaaaaataacagatgctggtgaggttgtggagaaaaagaaacatttatgcactgttggtggaagtgtaaattagttcaaccattgtggaagacaatgtggtgattccttaaagacctaaagacaaaaatgccatttgtcccagcaatcccattactgggtatatacccaaaagaatacaacttattctattataacgacacatacagggttatgttcattgcagcattattcacaagagctaagaaatggaatcaacctaaatgcccatcaatgatagactggataaagaaaatgtggtacatatacattatgaaatactatgcagccataaaaagaatgagatcgtgtccttttcagggacgtggatggagctggaggccattatccttagcaaacaaacacaggaacagaaaaccaaataccacctgttctcacttttaagtgggagctaaattatgagaacacatggacacatagaggagaacaactgacaaagcagcctactagaggatggagggtaggaggagggagaagatcaggaaaaataacatatgggtacaaggcttaatacctgggtcataaaataatctgcacaacaaacccccatgatacaagtttacctaagtaacaaacccacacaggtacccatgaacttaaaaatgtttttaaaaaaagaaaataatgcttagcacaaacgagtcatttccctctcctctgcaaacttacaatacagggtagagagtgatgttatttaaataaataaataaatgaataaaattaataagaaacaatgctgttaagtgctgtgaagcaaaagcacatgatatgttacatgggagtggctgatgtagcctcacctgggtaacggataaagggaagcttctctaatgaggtgggctgagagctgaaggatgcatcagtgtgaacttggagtcaaggtcaagagcaagaataaggagggatctgtgcagaggacccgtggtggaaggaggaccacatggcattcaaggctctgcaaggttcctgtggatggtgattagaggatcgtggagaaagtactataaaatgaggtttgcttgccatccatttttacttaattttttagctttctcttttcctgttcttgtgtatccttttgtcttcatcattatattttatctttatttttcaatagcttaaatattgaataactaaagtaacatcagcacatttcatcatcctcccaagtcttggatgtaaactctgaatcataatttgggaaacatggaaagttggaaaagagttcaaggagattcatattcttaaagagcgtgaaaatgacattttaaaaatttaaataattcatactttgaggaggaacaacttaaaagtgtccagtacctattgagtgggaatacagagtgaattattaaaggagaattaaaatacctgttcatacttgtctcttgatttgccacccgcttgtacgccattagctacagtcgttttttatcattctgcagattttaattgttttgattaacggcacatattcttcaaatgcagcacattaaaaaaactataaaatgatgaaaaaagaattctgcacaatcacctcaatatattatttatcagacctgtaaatcaaatattttacaccaagttgtctccaggtcattcagagctggaatttaaaaaagcaaaggtagtgataaatatatctaaattgactttacatttatcatatataaacatgatatatatggacaatatagaactgggccataatcccaaaaggcacaatcccaaacattgaaatctcaaaagatcaaaatcctgaaaatacggccaggcatggtagttcatgtccgtaatcccagcagtttgggaggctgaggtgggcagattgcttgagcccaggagttcaagtccatcctgaacaacataatgagaccttgtgtctacaaaaaaatcaaaaaaattagctgggcatggtggtgcatgactttagtcccagctactcaggaaggtgaggtagcagaactaattgagctcgggaagttgaggctgcaatgagccgtgatcacaccactgcactccagcctgggtgacagaatgagaccctgtctcaaaaaaaaaaaaaaaaaaaaatcctgaaaatataattctagaaaaaataattttaaaacattcttttaaaaacatgtatttggctgggtgcagtggctcacgtctgtgatcccagcactttgggaggccaaggcgggtggaccacctgaggtcaggagttcaagatcaacctggccaacacggcaaaacctgtctctaccaaaaatacaaaaattagccagacatggtgcagacacctgtaatcccagctactcgggtggctgaggcaagagaatcacttgaaccctggaggcagatgttgcagtgagccgagattgcaccaatgcactctggcctgggcgacagagactctgtctcaaaaaaaaaaaaaatatatatatatatatgtgtgtgtgtgtgtgtgtgtgtatatatatatatgtatgtgtgtgtatatatatatatattcacatttttaaatgggaatttatttgaaaaatgtatgaaagcataacggaacatttcataggccactttacacaataaattaggcaataataacttacatatttttgtaagcataaatactcagtatactaacaacagtcacacaggtacaacagttatgagcagatgaaccagattcagaaagaaatcagtcaaaaagagaaacgaataattgtgtgcacccagctttatatctgccatcatctgaaatactatgaaggacagcctaagtctttatgagatcagtcaagtttggatggatcaccatcacatgtgcagtcacccaaaaagccaagatctcgagaaattttatttttcacaaatgaagatgttcaaaaagaacatcattccatttattgaggaagtttcaacatttttacatacacgtacaatgcttacacacaaagtcaacattgtgataatgcactttcgtgggtcaaatttgtaaaaccctgcataaaacaaattagaagtctttaaaagtctttacacaatttataccctagtactggaaatgatgtgaagatgaaatacacagcatagtgaattaatactatgtgtggatggatgaaactcatatacaattgagtaatttggcatgagagaattcttgtatttttcacctgcattttcactttttctatgatctttaaaacactcactgcacttgaatttggagagtgtctacaaattctggaagtatatgctgtccacttgaaagtctgtttattggctcatctcttgtaattgagcaattttccgcttccaggcaccaataattattagcttttaagccttatatttcaccattaagtaacctcatgtgcttgaattatcatagtcttttggtgaggaaattttacagatctcttccatcatgtaacaaggaatacagttaaaaaaaaaatgcatctgtggtcccagctacttggaaggctgaggtgggaggatcccttgagcccaggagtttgagcctgcagtaagctatgatcgcaccactacactccagcctgggtgacatagcgagatcccgtctcaaaaaataaataaataataaacaatgatattcatcatcctccaataccaaatttttattagtctccagagagactgttagggttctccagagagacagaatcaataggatatccatatagatatatgagagggtgtcgtgagcagtgcaaggtcaaacataatcacaaccttgcacctttgtgtctttttataagattagactttcattgatgttattttaattataaaagccacacaccatatggagtttccaaggaggcgattttctttagtactctccatttacttggtagccaaagttgtgcgcatgtggactcaagccaccttactagttagttaataacataaaccatgcataaaattatacttaatcaatataaatgttttagattaaatatttcacatcaaacaaaataacatcaagagaaaaagggatagaaaaaaatgggttaatgaacaagttcagggaaagtgacgtagacaaagagaatgtccaggcctagtctggatagtctgttaatgtcttgtaaggaagtgtctttgatatggacagagcctttggcagcagaggatgggtgtttattataagtgacagtaagatggtgtctgttaagacggccatttcaagctgctggagttatggccacagagtcctctggtgaggactgatagtaaagagtatgtttggttatgtccttatttggttggatgtagcctttactgattaggcaaaatatttgatcctcattgacaggacgtcttttaaaatgtaagatggagtctttttctaagatagaattacttatgtcaagcagattctataaagaagagatttattagggaaattggctcacgtaattacagaccatctgtaagctggagaccctggaagaaccagggaagcagacaatggtgtaaccctcagtctcaggatgaagcctcaggacccgaggcaccactggtgtaagtcctggagtccaaaggctggtgagcctgaagttctgctgtccaagaaagtggaagaaaagtctgtcccagctcccagagacagaccagttcactttttgtatttgttctttccagacccctaaccaactggatggtgaccaccaccactgagggcagatcctccccacctagtccactcaggcatgcgcactgacctcctctggacacacccaaaataatgctttcccagatttctaggtattctttcattcagtcaagctgatatctagaattaactccacaaatctaccctttgtcaatatggcactctttaaaccttagtacatttccaaataaagacaataataaggtcctagttcccctaacaagatgcaactatcccaagtacaaccaaaaacacactaatcccttccccaaaatttgacttccaggattgcaacattagggattttatctttagggatagtgatttacagaattttagacttaattttgatcaagtgattttgatcttttgggattttcatcttttgatatttttagcattcaagattatggcattcaggattgtgtctttcaggattatggttggcaccaggacaatataatttgtggataggtgcttgcaaataccatactcaggtattcatctttttaaaacattttaaatttataaaaaaaaagatataaattttaaaatttcttaacttaaaactttttaaatttcttaaaaatgtcattaaataattttaatataaaaacaaataaattgttcttttgaaatgtatagcagaaatttcaaatatgtcataacagtttttgtctttttttgatgttgagtatgtcaattagatttcagtctgatttttgttgttgttactgttgttgttgtggagatagagtcttactctgtcacccagagtgatgccatcacagttcactgtaacccaaaactcctgggcacgagcaatcctcccgtctcaggttccagagtaactgggactactggcacacaccaccatgcctggctattttacttttttgcagagacaggggtctcatttcattgcccagatggtctcaaactcctggcttgaagcaatcttctcaccttggcttcccaatctgctgggcttacaggcatgagctactgttcccagacccagtctactttttaatatatgttaagtcactaaattttaagtaatatcatattatgtttgtggacaaatcattttttcatatttaaattaaattaaattaaatagcatcatgggtcacttgataaatgggggaattttgaaatttacttcatcttatgaatattatcaaatgttacattaaataaactttataaatataattttaacaatatggtgatattgttttatctaaacttatttataaatcacttcacaaaaataatgaagtaattataaaaattttataaaggaggtctgtgagattatgtactacttcgaaaggaattcattaattaaaaatgttgggaaactgttctaatctacttgaactctatcccaaagagttccagtgtacacagtggttataatattaaaggaacagcacacctgctgggcgtctaacactaacctcttgttttcttaccacaattcttttttatcttctataacattttacaactaagtgttaatacacacatgcacatacacccacactcagacaattgaagaaaataatattcacagtcctccccattaaaatgtatgtgcacccaagtaagtaaaaataacctcctggatttttttaagaaataaggcttccagaaaatcttttaaaacttaaaaccatagctatagaaatgatttgtgctgcaagtatttaagcacacaaggtcagccttgattggcagttagaattttacatacctcaaaatgtgtatgatttcaattaagttctaaatcactttaggtgaaagtatgcaaagaaaattattttcctcctggagaataacagggacttaacttggctccctgaggtctatacaaagcacttaatctcttttcctcagtttctagctgggaattacatctctacaacatagagatgggatgaccaaataatctaacatctataccaagctttgaagtttagtaaaacggatgtgctggttgggtagcagtgctattgttttcattgtgtttcattactttcataacccagggtttccattgatgaaagcctacaacaaagcattcatggtgtgtgtgtgtgtttcaaactgccacattagtgactggctgtgtatacacacaaaacatctatgtattcattggtaaattagtatgaagtgtttattatttaataatttaaataaaaattttttcaacctttccattcttttaacttttcttcagagtcaccagaattatttcactaatacagatcagaagtgctcttaaagcacacaccctccattagatagcaacatttatttcacagacctaattttgacctaaaaaataaaattttatagcctacaaaatgaataagtcatcgagaagagctgatacttaaaatatgtacacatgatgagatcaaagattgccaaatcaatgtgacttcttaaaatcctggaaaaatgagagcaagacatctcattgacatctattagaagtaccttagtaaattaaaacatttttatcttcccctttctttgtcaatttctatttgagtaatataaaggcttatgttctcaactggagccaaagaaacacctattaccattgaggtttagataatttttttacaatttttcataggacctacacagagtccttatctgcaaaaaataagatgtgaattttataaaatgcatttgccacacaaataaggattcattttaaaacactaatctatttaaagtgacactactttttctttcctacattaaatttattctgaaagtgttaaattaataataattaaaagtgttttagttagaaataacaaccatttatgagaaatgacaataaaataatacgaaggatgttgaaagtagtctacatatccacagaaatgcagtctcactgatgtaatcttattaggaaactatacacatcttcaaatgatatactgtgacatagttttgtagctattgctttatgtgtattcattgttcattatatgctaaatgctgaaacatgaatgaatgaacagatgaatggattgcctcagagaccatgtgatatttttaacatcaaaaatggtgataaatatttattcttcaagaataagttcagaaatgacaagaccattaaaagcaaactctgatgaataataaagctaatcaggatttggtgaatggtagagaaaaaagtgttcatttgtttagcatctactatgtgcttgccacatagtaaaactgctggtttccaatcctctttttctgcctaaaaccccaaatttagtttttttcccctttcccctgctaactaaaacaaagcaaagtcaaccccattcccagatcccgggctagatcctcataaatctaagccaatcagtacacatggaattaccctaggagctcttattgggtgagaagtgggcatgtcattttggcccaattagactgacaaaaaagatttctattccctgatcaggagatttttctcttcctctctctgaacatgaaaaaagaggcctgtttttgcccgtttctagcagtctttgacaggttggttttcctgaagtcatgagggaaatcagcctgaggttaaaggaataaacacagctaatggcagggtccagagaatatcagagaagcagagctggagtcctcatataacatggctggtgcccaccaaatctctgaacttcttgatgtgaagaataatacttttcctatttttaagctagtttgagtagagtttttctttcccttgaaaaaagcatcttaactgaaagaataagaacaataacactaatcatttgagaaattaccatttgccagatattgcagcaaaaattaaaattcctaattctcaatatagctctgctctaattttcatttaattgatgaggaaaatgagtttaaagaaactaagtgctttacctcaaaaatatatgtatatatattttaccaattttaaagtaatttaaaaaatatattaatacagttttttttaaatgaggtaccttattcacaatatcttgttatcagtgagtgaattatgattagaatctgggatcctctagctttaaaactcgtgcaaagtactttatgcatcttcacatttgatgttcaccacagccctacaatgtactatcatcaacaccttagaaataaagcatcttgtgcaagttagtaattaatttggctgttaataatggaaaaccaactacagtggtttaaccatacaaatgtttattcttacatataaaaggaattttgtactacacaattctgtgctagtaaggtggcttcacaaaattataactaaccaagctccttctatcatactattccatcatcctaatccaagggctactacacacaaagtctcctcatggttcataattgctgctgaagttccagtcatcaagaccatactccagtcagtaaagcaaaagatacttcttctagatgaattcactttcttagtcacattgcctcacttaactacaagggaggctggaaaatttgttattttatctgatgtcttgctgtttcaaataaaattatgattctgtaactaagaatgaaaaataaaatgaatattggtaagatagaaatctttgccttagcataagaaccttaaggaagtaataagacttgcataaggttatacaactaggaagggtagtgactcagtatgtgaactatggctgtagaattccaaaactcaagttcctaatttttatgctgcatttcctccctaagtagatgcatgagttatacagcataaagaaatggcaccacatgataaaacaaaaattaaaaatgatgttaggtattcatttgtgagttaaaaattagactcattactttagagttatacttttagtatgtgtaaaatttactgacataaaataaatggtatatagcaaagttaatctaatataatttaatgacagcattatcattgatatgttggcttctgtagataaacaggtatgccctttaagcactacatttacaagcttatcatcatattttaaattgtcaattaatttagccctctgtagaattatgctattcaccctatattcctaactcatagagcagcatgaattagattctttattcaaatgatgtataagcattattaaaatgtatttctgttgtgctgaaggaaaggaaaatgcatgtgaggacagaattaaaagagcagaatgcctagattccagtcccgacttcacccccagctcactctgtgatcctaaatggaggcaatttgggcctccatttctgcattttttttttgaaagacatctgagtttcttttattataaaattcccaaatcctcatgttcaatgaaagtaagatctataccttagcttttggataggaagaagtaggcaaagacctaaagaggaaaaaaaaataaaattaaaaaataaaatcctaggctttctctgctcaaattatggtttaacagaacctgtggaaatagactgaaatagactatttgggctccctgtgtgttctggtatacatcattaacctggcatttctctgaatgcagaagagaaaatggccctctttgcaaaactatgtttcagagttctgaatttgatagtcttattgattgtaagtagaatttatacaagttctatttattatctcatctatgcctaaaattgaaggaaccaattccaactggtaatcaaatactgggaattcataaaaaacaaattaggtagctctacattacaactaatattgaaagaagtccaatacatattgttaaataaaataaaattaaggtgcagaacagagggtatagtctaaaggcattgccacaaaaaagtatatttttaaaagtatatgttaactatagtatatattaaaagtaagtatatattagctgggcatggtggctcacgcctgtaatcccagcactttgggatgctgaggcaggcggatcacgaggtcaggagatcgagaccatcctagccaacatggtgaaaccccgtgtctactaaaactacaaaaattagctgggcgtgttggcacgtgcctgtaattccggctactcaggaggctgaggcaagagaatcgcttgaaccaaggagtctgaggttgcagtgagccgagattgcaccacagcactcaaacctgaccacagagcaagactccgtctcaaaaagaaaaaaaaaaaaagtttatattaaaaaataaaagtgtgtggcctggcgtggtggctcacacctgtaatcccagcactttgggaggccgaggtgggccgatcatgaggtcagcagatcgagaccatcctggctaacacggtgaaaccctatctctactaaaaaaatacaaaaaattagccgagcgtgatggcgggcgcctgtagtcccagctactcgggaagctgagactggagaatggcatgaacctgagaggcagagtttgcagtgagccgagatcgcgccactgcactccagcctgggagacagcaagactctgcctcaaaaaataataataataaaataattttaaaaagtgtgttcatgtaaatacacacacacactttgcaatgtgtgcacatattgtgtgtatctatatatttctgtttcattttcggtttctaaatctgccaaatttccaatcttgtttagtttcttgaacataaacatagatattttaaatttagtttctggtatctacatgatctatatcccctctacatgtgtgtatatatatatatacacacacttatatataagcagcatatgtacacatatgtgtgtatgtgtatatgtatgtgtatatatacacatacatacacacatacattgtcatataatttgggaaagcttaaagcaattatcttttcaaaaagtgtttctcatccttctagagtcagacattttcaacacatttcactgttgcttctggctcttttctgtatttttcattgtttataatgtaaatatttaaatattttcttctgatctatcttccagttcactaattctctattcagctttatgtaatctcctgttaaatctatttatttagttctttatttcatttattgtatttttttacttctaaaatttctgtttctttttcagtttctaaatctgccaaatttccaatcttgtttagtttcttcaacataaacatagatattttaaatttagtttctggtatctatatgatctatatcccctctaaatttgtttctgttatctgttcctttcccctggcttctactcacatgatcatatctccttgtatgcctcccttttttttgaatgctgaaaattatttataaaaaattatggtgctaatattaggctctagagattgtaatctttgtcctgaaataattacttgcttcagacagacaggtatgctagagtcactagcaaccacaaataacctcaatccaatcaagaattaggataatttaaagctgggtcttctccctggaagtgctgattgattctaaatttattgtcattcctagaatgtaatcattctgaatcctactccaaagcttcagagagttaccatgttttcttttccaacatgaaaaagaaacacaaatagatacattggtccagaggaacacaaattggagtgcaatttggactacaatttgtgttcctctggcctatgtatctactgaagcacactttcagaattgatggcacctctagggattgaagtgtctccaaatgccaagttcaattctatggcatttttcttctccagggtcttggctgcacaatctctcaccatcttggtagctttccaatgccttaagagaattttcaaaatttttccagcttctgtagttgtttggagtgggagggtttgtccaagctacctagcttgcaatttccagagacagaaatcctatatatgttttttaaaatacatataaatatctgggaggatatatgagaaagtatataaatgtgcttacctcttaggagagagagagaaatttgggtaaggaaacttttcacttttagcatacaacctttcatatacagttagaatttctttttcttataagtatgcattgcttttattttaaaaatctagtttataaaattattcaataaaagtttaaaaataaaaatagtaatcaaataacaataactttgtgacaattatttaatattcactacatggaaggattatcagaaagcctacctaaactacaggttggaagatatgtctgtctattaatctgatttgcaatctacatcacatagctaaaaaatacacttctataaaggaagagaacacatggaaaaaaataagtcaaagaaggcaaaaaggaatcagcaatatttagccattgtatttgagatcttaaagtttattatttatgtgtcctgttatttgcaattaataaacataattatcttcaattgttagacaatatatgtaataatatatacagcggtttctaatcactaaattaacatttttaaactagaatatctgttttcagggcaaaatataaagcatagagactttccaaaattagtatgtgacttaaaagacatgcaaaagtgctccctataaatattaacttgcttatgccacaagtatgtactcaacactatttgacagtgctaatagacccaagcattcagtcatttggcaaagccaacaaagactatggcttaaatgggtctgaatgattggaagaaccattgttctgcagtttccctcagttgtgatatccgacccttgtgcaataagtcccacagaaggaaaatattgacaaaagaaaaaaatagcaacataaattttaaactcaagctaatggcattttcattgtgagctacaggttacatcctaattcagtgaaactataactttgcaaatattcattgtctattgacaagtttgaactagaaattgatttcaaaatggaaaaacataggggcatgtggaagatgtctagtttacagtgatacatagaacatttacaaaagatatatgaactactcatattttgcttctgtgaactgaacacttcatttatccttttcagctctatgagtgaacaacttgttccttaggagaaaaaaaaaagtaaagctgaatgtttttgaaaaatctttcagatctctactcatatccagtttatttaagttacataatcccatctcaataccctgcaggccataatcatcaagtaaatcacatcacgggcacctcctataaaagagaaaggaaagggatgtaaggaaatgcacacatgtatgtgtctatgtgtgtatatctatgtataccaaaccaaagaagaaaatgtaatagtcatgataacacagttgatactccacaattttataaatccccttctccacttgctccatgttcctttattgtaagctatattccttgttcagaatcaatgttaattgagattaccaggacagtgcatgatgtcagaagtttggcaagcagggaaggcaagtgcatatcttaaacaagtgttttttcccatgaatataagtccttcagacagaaggcatctaatattattcaccttctgccagagtgtgatgccctactaaggaccagctttgatatttgctattgatatgttgtgcattaataaaaagcagtagcttgatcaactatggtgatgataaaattaggttttaagcccccattcttcccaccatggccacgttgttcatgagcacattaagcaagctttgaggtagctattacctaggctgacaaacacctgcagagcaggtcattttgtgcaccagactgttgagaacctcttctgcaagattttatgttgattattaatttggaacacaaatatttgcccattttaagaagactatcacactcctcttccccaaactttcttttcatctgttccgactgtgttatcttcgaagtccctagccatttgaccaaaccactgatcattatctaagaatcagtggagcttcaatacaaaagcgaaatctctttccaggcaaatggataagcagatacaactgtccatgccctttacgtggaagattttgcttcctcaataaacttcagcagcaggaaggggtgtataaggccacagttagtctatttccaattagtgttggcagatcatgcatgactactcaactggccttaggaaacatcccattaggaatgagtatagattgaagaaggctgtgaaggagtagacgcactgggcattgtgaaccacctgctctttgaataaatttgtgctttcagggcctgctctagtcacgtgatgatggagtcctgccatcaagctcaggtaacgggggggttcacaatggcttttgcttctaaatcaaaaaatctttgcattggtggaatcatgcactcttctatatctttcaataacactgtttatacaaatatctaaaaattataagtggttgaattttgcacagctcacatagctttgtctatcatacagtcagaacttagtattccactaaaaatcgtagttctttacccattagtctatatcttagtgtattagtcttatctgcttttattcagctgtaacattcactatccaatatattattagatttttaaaacagttctcagacgtaggttgattttattttctcattatttatctacacagtttattttctataggtcatatacttcactgtttattataaatttatttattcttattccagtattgcattctcctccttatcatgttttttgttgttgctgttctgtgagatacttctcagcatatgccaagtgttggtttggtgttaaatacccacattgattttgattctatttttagcaatttggctacttaaataacacttctagattgtgtaaagcaacattttatctttcgcaacatactttgtggatctgacctcggttcttactaacactaaatctaggaggtaaggtgggcagagaaggtttttctttcttactttcttcctttctttctttctttctttctttctctttcttctttctttctttcttctttctttctctttatttttacattttttatattaataggctacttttaaaaacagttttaggtttatagaaaaattgagcagatagtatagagttcccctattccactctcccttacacagtctcctattattaacacgttgcattaatgtggtatgcttgttacaaacgatgaaccaatgtaggtaggttattctgacctaaagtccgtaatttactttttttttatttttttattttttttactatttctattgtttaagttccatggcttttgacaaatgtataatgtcatgtatccaccatacagaataatgctgccaacctgaacctcccctgggcttcacctattcatccctctccctccccactaactctggcagtcactgatctttttattggctctatagtttttcctttttcataagtcatatagttggaatcatacagtatgcagtctttccataatgtcttctttcacctgaaatatgcatttaagatttcaccgtgtcttttcatggcttggtagccaactgatttttatagctgaataatattcccttgtataggtgtaccacagtttatctatacattcatctactgagagacattttggttgcttccagtttggggcaactattaataaacctgctataaacatctgtgtgcaggtttttatgtggatgtaagttttcaactcatttggggaaatacctaaaagtgtgattggtagatcatgtggtaagacaaagttaaacttagtaaaaaataaataaaaataaaggggccgggagcagtggctcacacctgtaatcccagcactttggaaggctgaggcgagcggatcatgaggtcaagagactgagaccatcctggccaacatggtgaaaccctgtctctactaaatatacaaaaattagctgggcatagtggcccacacctgtagtcccagctactcaggaggctgaggcaggagaattgcttgaacccgagagatggaggttgcagtgagccgagatcgtgccactgcactccagcctactgacagagctagactctgtttcacaaaaataaataaaataaaataaaataaaataaaataaaataaaacaaaataaaataaaataaaataattttaaaaactggcaaactgtcttccaaaaggttgaacaagtaatgaatgagagtttctgttgttccatagcctcaacagcctttgttgttgtcaatgctttggattttagccattctaataggtatgtatagtggtatctcattcttgtcttaacttgcatttccctgatgatatgatcttcagcatcttttttatgtttagttgccatatcctcttttgtaaggtgcctgttcaaatcttatgccaatttcttaattgacttttttattttcttattgatgagttttaatagttctttgtgcattttgaatacaagttctttttttttttttttttttttttgagacagtcttactctgtcacgcaggctggagtgcagtggcacaatcttggctcactgcaacctctgcctcccaggttcaagcaattctcctgcctcagcctcccaagtagctgggactacagaaacccgccactgcactggctaatttttttttttttttttttttttttggtatagacagggtttcactgtgttggccaggctggtctcgaaatccggacttcatgatcctcccgcctcggcctcccaaagtgctgagattacaggtgtgagccaccacgcctgcgtgaatacaagttctttatcagatatgtgttgccaatattttccctcaatttgtgactggtctttccattctctgaaatgtgcttgattttttttttttttttttagatgaagttttgctcttgttgcccaggctgaagtgcagtggcacaatctcggctcactgcaaccttcgcctcccaggttcaagtgattctactgcctcagcctcctgagtagctgggattacaggtgaacacccagctaattttttgtatttttagtagaggcaaggtttcatcatattgtccagtctggtctcaaactcctgacctcaggtgatccaccctccttggcttcccaaagtgctaggattacaggcacgagccactgcgcctggccatgtccatttaattttgtttctgtcacttgcaaatgaaagaattctggctaatagatctttgtagactttcattaatatataaaatatattttaaaattgtatcggaacttgaccattgaagatcatctgtcaatccaaggatatgtatgttgctgtcattaattagtgagtcctgtagataagacccacaagggattagcctgagtaagctatccctaaccttctgaacctttcattcaggcagatttagcaataaaaaaaaagaaaaaaaaaactttataggaaatatatactttacaatacctgaagaagcatctccattttcttttcacagttctgtttcattttggcaacttgtgacgaagaacctctaagcctaaaaattataaagaaaaaaatgggataatgaaaataattaatgatataaatattaatattacttatagaatatttttaaactccaacaaattaacggctctcaattttccatttgcttttatgtttatcaaaatgcaaagggacaaagttgttgatatgccatgttgtataattgatttatgtatagaagtaattcatgatagtcaaaattaaaatattatgccttgatatagcagtgctcattagagtaaaatcacgctaggttatagaaacgtcttttcaatttacagtgtaaggttattccaacaacataaaaatagaatttaattgaatttgggtagaattatttccaacatatgtatgagatgaattcaagattgggagcagggggtgtaaaacaaatgtttcttcaaagatgttttccttccagtctaaatggtngcaacattaaacctgccctctgcaaattgtgccatctggtcctcaccagaagagtccgtgactatgtggcttccatcggtccaaggcagggctggccttctccccttcacgctgattttctggtttgaggacccgtgctctgaggcgtataaactgctttacttcccctattaagacgttgacatgaatccaaagcggtatccttgcagtagtgaagaaaggcttcaaaattgaaatgaaccacccttgcagtttaatgctcttgtcatgtagggtttcttcctttccttcctttcttctgtccttttttcctttcttaattttttttttaaataaagactacaaacagcaggggatatacagaccttgcaatcgctagaaaatgaaatgtttccacagcattgagatgcatttagtgctaagacgaaaatttagttccttctattcttttgtaaggagaaagtcttctttgaaacaaaaatgaaatagaaataatttcagggtgatgggacatccccagccttcaggtcatgctgctctctcatcattttttaggttgcttggtgataaaagaaaaggaaaaaaagagaaaattccctaatcagagtttcatcaactgagtgatcaacaagagaaaatggccacttttatattcattaaagtaacttttcaaagaggagagatttcagaattagtgacactgagtgcatattgctaaatttattgttgaccgttacttggaaatttttgtttgatctttctttgctttcttctgtggtgtagcttcattatatatatatggttgcatctttcttttaagttcactctgacaatttagtttccttatgtttcgttgttctgggaatcacattcaaaagaaattaaggctttttttaattcaaaaaaagcaataaatctttcaacaaataacataaatttttaattaaaaaataaaaacagctacatgcattatatgtatataaaacatttctttatttgatctttctccaatgataacagtattataagattgttacaaacaattaaaatagtgtaatataaaaaggtagaggtgcagaaataattttgtgtatactccccacttcaccccccatctaccaccatctcaccccgctgagttaaccgatgttggccatctttgatatatccttttatgctgctatgtttacatattctttataccatacatagagatttgaaggtaatactttaagtgaaaaataatcatatcatatgggttttttgcaaattgtgttatttattttgaaaatatgtcatagaagatttgtatgatgaatttttttaactttttattacagaaaatttcaaatatatacaaaagtaggaagacttgtaaaattaacccccatgtacccatcaaccagcttaaacaatgatcaactaaaagacaatatcttttgcatcttaccctccctactcaattattgtgacacaaatttagatatcatgccacatcaatcataaatatttaaggtgcncctattaatngaaatgatgaatattttagtacaaccataatactttttaacaatctaaaaattaatagccagccagtattcaaacgtccagttttctcataaatgaagtcttatggtgctacagaatgtctcacaatatggatttttttggtcaggaataactcacaggtggatttgtatatatctccagaatgcacatgtctgctagtctctttttttgtgatattagcagccattgataatcattgcctacttctattaatttattagtggttgcaaaattgtaatagtctaatgatacaactttttcttgattcattgcctggaatatttctataaaaagaaaaggcctttaatcaacaagtttcttactctgaggaggagttcatataggaaagagagaacaaatgcttaaatatttccctttgcttacctcttttcaaaataatgaataagatttcttataccctccaaaaatatccaatgatttctaagtataaatataaatttatggatgtaaacatatttggtatgtctcaatccagtgtgtttattaccttttatgttgtttaaatggtcatatcttttgccacagacttttgagcccatttttataccctctggatggctattttaccttcttaaaacaagttatgccagctttagcatttgacaaaatgcaacatccttacatgattaagaaaaaaaaactgaacaaattaggtataaaaagaatgcacttcaagataatgaagaacatatatgctgaacccatagctaatattacactcaatggtgaaaagcagaaagttttttctctaagaataggaacaagacaaagattcccacactcactgcttctattgaatatagtattggaagtcctagccagagcaattaggcaaagaaagaagaaagagagagcataacaattagaaagaagtaaaattttctctgcttgcagttgatatggtcttatatctagaaaatcctaaagatttcaccaaaaaaaaaacctaaaactgtcaaaactaataaacaaatttaataaagttgtaggatgagctttatttgtattgatcaacaaaatcaatacacaaatcagttacatttctatacaccaacaacaaactatctgaaaaaataaatgaagaaaacaaacagaaaaccaaacgccacatgttctcactcataagtgggagctgaacaatgagaagacaaggacacagggaggggaacatcacacaccggggcctgtcaggtggtggggggcaaggggagagagagcattaggacaaatacctaatgcatgcagggcttaaaacctagatgatgggttgataggtgcagcaaaccaccatggcacatgtatatccatgtaacaaacctgtacgtttagcacatgtatcccagaacttaaaaaaaaaaaaatgttgataggggtgaaactcagagaaaaaaaggaaggggagaatcatgggacccatcccagcagggtgggaatcattagattattattaggaaatggaatgaggtaaatggaaatttattatgtaaaataaaggccttaatacagtatcaaaggttgagtggaccaaagagagcccctgctgcttccccagtattagagagacccaagccaattttctatatttaccccagattggagaaattttttttaaaaaaatcagaaagcaaagttacaataaggaaaaaaaaaaaggacaggccaggcacggtggctcacgccagtaatcccagaactttgggaggccgaggcgggcggatcatgtggtcaggagttagagaccagcctggccaacatagtgaaacaccgtctctactaaaaaaacaaaaattagccgggcatggtggtgcacgcctatagtcccagctacttgggaggctgaggcaggagaatcgcttgaacctgggaggcaaatgttgtggtgagcagagattgcaccactgcactccaacctgaaaaacagagtgagacttcagcaaaaagaaagaaaagaaaagaaaataaaagaaaagaaaagaaaagaaaagaaaagaaaagaaagaaaaggaaaggaaaggaaaagaaaagaaaaaggataaaatacttagtaataaattaatcaaggaagtgaggagtctgttcactgaaaaccacaaaatatcaagaaaagaaattttaaaagacccagaaaaatgaaaagatatgccatgttcatgaattgaaagaatcagtattgttaaaatagacatactccctaaagcgatctacacattcaatgcaatctctatcagaattccaatgttattttttggagaaacagagaaaaaactcctaaaattcatgtggaaccacaaaagaccccaaatagccaaagcagtcttgaacaaaatgaacaaagctgaagacgttatacttaatgatttcaaattatagtagaaagctatagtaataaaaacaccatggtactggcataaaaacagacacatagaccaatggtacagaattgagagcctgaaaataaacccacacatatacagtcaactaatgtttgacaagggtgcccagaatacaaaatgaagaaaagacaacctcttcaataaatagtattgggaaaactagatatccacatgcaaaataaaacccggccattgtgttatgccatacacaaaaaatcaactcaaaatggattaaaggcttcagtgtaaggtgtgacaaaaataaaacttctagaagaagacaggggaaaagttctttgattcatcttagcaatggatttttagataagacactgaaagcacaagctacaaatgcaggaataaacaagtgggattatatcaaaccagacagctcctgaatagcaaaggaaacaaccaacagaatgaaaagactccagcctgggcaacatggcaaaaccctgtctctactaaaaatacacaaaattagccaggcgtggtgcatgcctgtagtcaggtgcatgcctgtagtctcagctactggggaggctgaggtgggataatcacctgagtctagtgtgttagtccattttcacactgctataaagtaataccaaagactgggtaatttttataaagtaaagagatttaattgactcacagttccatatgctaggaggcctcagaaaacttacaatcatggcagaaggtgaagggaaatcaagcaccttcttcacaaggcaacaggagagagagaaagagtgcatgaaaggggaagacccccacacttatcaaacaaacagctatcatgagaattcactcactatcatgcgtacagcataggagaaaccatccccatgatctgatcacctcccaccagtttcctcccttgacatgttgggattatggggattacaatttgagatgagatttgggtagggacacagagccaaaccttatcatctgggaagtcaagagtgcggtgagctgtgatcactccactctactccagcctagacaacaggagtgagaccctgtcttttaaaaaaagaaaaagaaaaagaaaatacaacaggatggaagaaaatatttgcaaactatacatctgataaggggttcatattcaaaatatataaagacctcaaacaatttcactgtaagaaaacagacaacctgattaaaaaatgggcaaaggacctaaaaagacatttctcaaaaggagacatgtgaatgagcaacagatatatgaacaggtactcagtatcactaaccatcaggaaaatgcaaaccaaaccataaggatataccatctcacacctattaggatgactaatattaacaaaacanaagataataagctttaatgaggatatgagagaaaggaaaccctgatacactgctagtgggaatgtaaattggtacagcctttaggaaacaaaaacagtaaggaggtttctcaaaatattaaaaatagaactaccatatgatccatcaaccccacttctgggtatttatccagaggaacttaaatcaggatcttgaagagatacctgcatgcccgtgtgttttgcagcatggacaggatatgcaaacaacctaaatttccactggtggacaaatggataaagaaaatgtggtatacacataaaatggaatattattcagcctttaaaaagaaggaaattgtccaggtgcagtggctcacacccgtaatcctagcactttgggaggccgaggtgggtggatcacctgaggtcaggagttcaagaccagcctggccaacatggcgaaaccctgtttctactaaaaaatccaaaaaaaaaaaaaaaaaattagctaggcatagtggtgcatgcctgtaatcccagctactcgggaggctgaggcaggataatcgcttgaacctggaaggtggaggttgcagtgagccaagatcacaccattgcactccagcctggacagcaagagggaaagtctatctcaagataaaagaaaaaaaaagagagagagagagaaggaaatcttgccatttgcaacagcatggatggacctggaggacattatgctaactgaaataagacaggcacagaaagacagatactaaatgtgtgatctcatttatatgtggagtccaaaatagtcaaattcatagaagcagagagtagaatggtggttaccagggactgagatgagggaaaactggggaggtgatggtcaaagggcacaaatttttatttatgcaaggtaagttcttgcatattgcttatagctaacaatacttaattgtacacttaaaatttgctgagagtataccttatgttaagtgttctcaacaaagaagaaagcaataacaataataacaaaggtggcaagaggaaactttgggaggcaattaatatatttatggctgaatgggcacggtggctcacgcctgcgatcctagcactttgggaggccgaggagagtgggtcacctcaagtcaggtgctcgagaccagcctggacaatgtggtgaaaccccatctctactaaaaatatgaaaattagctgggcatggtggcgggcgtctgtaatcccagctactcaggaggctgaggcaggagaatcgcttgagcccaggaggtggaggttgcagtgagctgaatcataccacctcactccagcctgggcaaaacagcaaaactccatctcaaaaaacaaaaacaatatgttaatagccttgatggtgatgatggtttcatgggtgtatacttatcctcaaactcatcgagttgtatacattaaatgtgtacagtttttcacataataagcattaagtaaatgtaaactagtattattaatttcaatgtgctctttacacattcctactattgtgctttttctttcaacattagaattcttaactttgcaagtttatatttttattatatccacctcaatcctttctcagtcaaacttaaatctacatatatttgtgcaaagacttttgtcatagaattgtattaagtgccttatgaaatatacaataattatatcatgaaaaagatggtgggttgaacacctgtatctactttgatccctcctgaaacttcactaaaataagaataaaaagattttctttaatgaacaaaccaacaaaactgtaaagaacaggaaaggaagcaagaaaaacaagatttcagaagctggaaagcagacagacgagtgagtagcaaatcaaaggatttatcagagagagatgtaatttacaccagaaaatacccagagcttctgtcaccccacctttccatatgaaaaggcaaggaggatcatcagacatctgaggaaaagccgctaacctgacagataaagacaaaaccaaacaaacaagagaacaactccatggaagcagacacaatgtaggggaagaaacgttattaaaaagcaaaaactatcaatgatatcctccaataaattagagaaaacattgtagccatgtaaggagaatggaatgctctttaaaaagtgattctgaaaacaaaaagcataggtctcaagctcttggaaattgaaattctgtttgcagaaattacatgtattctatagaagagaaggaagataggcctcacagaaagtaaagcaaaaatgaaggacatggaaaataagagtaaaaatataagaaaaagagagaggactagtccaagaggccctaaaagggagagccaacaaacagggagaaggatatcatccacaaacatactcaagggaatttcagaaaattgaagcatatgacttcaaagtacagaatccactaaatgcccctcacagtggataaaatagatgctacgagaaaaaagaaaatcctcagatttctgctgatcactgagagataagagctttttgagagaaaaacagatcacatgaaatgaaccataaacctgaatggcttcaggcttcctaacagctacacttaaagcaggattacagtgaagcaattcctttaaacttctgaagggaacatgtttcatacctagaattccacccccagtccaactacagatcaagtcagaaggccaggatagacatttccagacaaataacatctctgaaattttaccttgctttcaacctatctatgaaaactactggaggatacatgccacaaaaattaaggagtaacacaggaaaaatgaagaataaaatacagaaaacaggagatggcacatgaagagacgagggaggaataatgaaaaagagagaccaaggatggcagctgtgatctggcacacaagccaagcaggccagatgggcccagccccaagggctgtgatagatattttttcaagaagatgcaaacgggagaagatctgatccatcagaaggtcttcagactgtgattcatgcctcttgctgtcccttgtgtcactgactcctctagatgttcacattattaatttccccataccatgaaatttagactggccttgaagttgaattactgataaaaacagaaagaaggcaattattttcttcagagaaaacaaaacatacagattgggaaaaggaagacttacttaatacaatggctcagctttgaatagcatatacaattgtcatgttatggtaatataaacactgaattctgatgtaatcaaaactataggacaatgttgcaaggatgaagacatggaaagagtgcacggttatggtgacaataggaggaaatagaattcagtctctcacatctgcagaggcagatggaatacctcagctcaaagtcagaaacagcaagaaaatcatggaatttagagatatggaggtaaattctaaaatcagctaaagtaaatgaaagtgtttcctgccaagaagggaaatcagggtggggcagggcagagaggactggtatatttcataacataacttgtagaactatctagctctttgaactatatgtacatgtaattgcagtaaaagtaaaggaaaattgaaatcacttttatgaaaataggataactaaactgcattttacaattctctttcccaaatgagataaaaggtatttcttcaaaacttatttccataatttatttctttgtcaacttcttttatcattgatggagcctatcctgtcttcattaaagcaaaattagcattagtacagttcattcatttatttattcaatcaataaatagatatcaaggcatccttgccttaaaggagctcaccatacctcagggggaacattaaattacaaatcccccagctgcccgaggaaaagaatatcaaatgtgtcattagaggacaggacagggatagatttgcctgaaagtatctcagaaagttccacaaagggattttaaagacctgaaagaggagactaggtagatttttattttactttgtacattctcaaggtaattcagtgaaatgaatgttaaagagtatatctttgtgcatgtcactctactaaaggctataggaaacatgaagatgaatgaagataaggtctttactgctggcccaaaatataagagagtaaaataagcactaacgtaaaagttcagagagcttcaggggagtggacacagacagttgttccagagaagggatctggagctttgggaaagtgcagtttgagaggtgggacgtgattaagtgtctatctgttcattgacttccagaagcagaatacttgatttatctgttcactcataattctttccttcattcaactgccatatattaagtgcctactctgtaccagatactggactgggtctgagtatacaaggtgtacttgagcacaggcaaaggaagacatcacagagcaagtccaaagaaaggagacaagctggctgggctggtgtacaggagggagtggaagggaggacaggaagggaggagaggagagaggtggcaaggaaagatgactcataaaaatcaaagaaggcagggatgactacccttcatgtttaatttttcccaacttcctctaactcctaaattattgcctgcttttaggaaattttaaagcccttggaaaaaaattcgtaaaataaacctatgtagaagttagttggctcctctgggttccttgggtggaatataacctgacagcctgaatggtgctgtcccttggggcccttcccaggtcccaagcctgtggacccttatgtgatatcccaccactaccctgcccatcccttcactctctaagagcagaaatggagcagctcagtgttttggcggttcatttgtgttgtagcgtgtgtcggtacttcattcttttagtttctttttaagctgctttgttgaaatattaactcatgtaccatatgattcaaccatttaaagtgaaaagcttttaagtatactcacaaagttgtacaaccatgaccacaatcaattgtagaacactttcattgccccaaaaagaaacctcatacccattggcagtagtagtgtattctttttgtggccgagtgctattcccttgcacagatagatcatatttggtctatccatccatttattgatgaacatctgggttgcttcaaccttttggctattgtgaatagtgcttctatggacatttgtttgcaagtttccctggagacaggaaacagattggcagttgccagggacttgagaaatgggcagggggagtgactgacttactaagttcagggcttccttttgaggtgatgacaaattttctgaaatataactttgggattgcacagcatcgtgaacctacttaatgccactgaattgtgtactttaaaatagttaaaatagtaaatgtcatgttttgtgtatttgccataataatgctccctttttcttctgtcagaagtctcatttcctttgctcccactatctctcgcttgcccgggcagcttcctcttctctgcctttagtaaggtctttagtaaaggctgtactctcagcagcacttgtgtgtcacttaaaactgtagggagaaagtgcccaaaacaacttgttctaacaggagagtttaactgggtgacatattctgcagaaaatccccgtggacaattcagccattcccatctccatgtctgaacttctttcttcattttgactgctgaaatctttcacagcttctattaaaattgcctcttaaatataaatagctgcaatctcattccaattcattccatgatttcaggctcctaacatgcgcgcgcgcgcacacacacacacacacacacacacatatacacacacacacatatacggcgcttagagccccgcctgctctcctttctcttacttggagaagagaatattatctacagggctctgtgtgctacaaggcccacatatctcttccttgggatgaacaaagaggcagaggcccgattggcaagattcctaaggatgagagatttctcacatgtagccagcagaggttgaaggaagaggtccaagttaccttggtaatcaggagctgacagtgcctcagagctggcactgggcttgggactcctcccaccccacctctatctccagttttcttgagaagagtgacagtaaaggtaatctgttatctccctatttctcagtgtttgcctttatctgctgactgggcaagacttctttagtttctgaagaagttttgtggttgtttttcttagccacagcaggcaaggactgtgcctaataattagaacaagctagtgataagaattgcagaagggtctttaggaacttaacattaatgagtagatagatgattcttaactgtctgctacactcatataggcaaaatcatgtgaactttattttaatatctatggtaggattccaaacaaaaataaattctggccaggcacggtggctcaagcctgtaagctcaacactttgggaggccaaggtgggaggattccgtaagtccaggagtttaagaccagcctgggcaacatagagagaccccatctctatgaaaaaaaatttaaaaattagccagatgtggtggcacacggctgtagtcctagctactcagaaggctgaggtgggaggatcactcgagcttgggaggtcaaggctgcagtgagccacgattgtgccactgcactctagcttgggtaacaaagcaaaaccttgtctcaaaaaaaaattggccgggcaaggtggctcacacctgtaatcccatcactttgggaggccaaggcaggtggatcaggaggtcaggagatcgagatcatcctggctaacacagtgaaaccccatctctattaaaaatacaaaaaattagctgggcgtggtggcaggtgcctgtagtcccagctactcgggaggctgaggcaggagaatggcatgaacccgggtggcggagcttgcagtgagccgagatcgtgccactgcactacagcctgggcaacagagcgagactccatctcaaaaaaaaaaaaaatctaaaacagaaatctgaggtgctagcatttgatgtttgtgtgtctgcaagagagagaaaaggtgactattgcttataaatttacagattacttgggttgtttttattagtagaaaattttatctttagaaatagacaataaagtattttgacattttaaatttagtgagggccgggagcagtgttcatgcctgtaatcccggcactttgggaggccaaggagagaggatcacttgaggtcaggagtttgagaccagcctggtcaacatggtgaaactccatctctgttaaaaatacaaaaattagccagacgtggcggcgcgtgcctgtaatcccagctactcaggaggctgaggtgagaggatagcttgagcctgagagacggaggttgcagtgagccgagattatgcaactgcaatccagcctgggtggcagagcaagataactaactaactaaataaatacatacatacatacatacatacatttagtgaggagcaaatgtaagcactcagaatcctcaaagctgatttatttttatttatctctagggaaaacctaagaacacatgacatgaatttgactattcaccttaagttttacagtgaaagtttcgatttgcctcctatcctattacaaaattcagatactctctttgttttgtctttatttcctaagaaatgatttcttttgttcttaatggaagattccaaagatatatctcctgactcaatgttggcttacagacccttttagacaagcttgttttgtatcacaggaagttcttcagattctcaactagaagccaaatgagtcaccattttgtcttctgcatctttcaaatagaatttgtttttgaaataatagctttattgagatataatccacatattgtataattcatctttttaaaatgtacaatttaaaggtatttagtatattcacacagttgtgcaattgtcatcacaatcaattctggaattttggaatatttcatcaccttcaaaagaaacctcatacccattaagagtaactccccacctccccctcccccagttgctggcaaccactaatctcgtttctgtctccatggatttgtctattctagatagttttcataaatagaatcacaatatttgttcttttgtgtctgtcttctttcacttttcacaatattttcaaggttcatccatgttgtagcatatatcatcacttcattcccttctatggccagtgaatatggcattcccttctatggccagtgaatggatataccacattttatttatccatacattagttgatggacatttgggtcatttccatcatttagttattatgcaaagtgctactatgaacatatgtgtatgagttcttgtgtggatgtatgttttcagttctcttgtgttcacataaacattttaacttaatacagactagacttgagcctgaatgacttgggtgggtgtgtccatgcctggaaaggaagaggagagggaatcaaagaagagcgatatcagtaaggagacagaacttacttcactaatttcccaatttgcaaatccctctaaaataacaccacctgatatcataacattatagaaccacaattttacatatgaacaactgagaacccagaaaaggtaaataacttgttcaacaatttgttgaaaaccaactgggccaagggccaatggttcctatttcttagtaaacttccttttgcaccacctgcattgcattagtacacactgatatccaggtggtgtctaattagaaaaatttaagttgccaaggatcctatttaaaaaaaaaaagttgagaattggctaggattttcttcaattcaccaggaacagaaatatctctgttaatcaaagctaactcttatggaggtcttagtatgcactatgtactaagcagtgttttgcttaagctgccatatttaattttgaaaagcaccccattttacaaatgaaggaaccagatttaaaaaaaaaaaaaaagaagtcacgcagctttaatacatgatgaagtagcaagttgaagccagaagcatcagactctatgagatttggttatgaagtattttgctgtgctgacagatacagataaacatactctgtcctctgtctcctttcttttgtcctcccactgccactgttgttttcataggttatgagggttttgtttttgttttttcttgagaaggagtctcactctgtcgcccaggctggagtgcagtggcacaatctcggctcactgcaacctccgcttcctgggttcaagtgattctcgtgcctcagcctcctgagtagctgggattacagatgcccaccactatgcccagctaattttttgtgtttttagtagagatgggatttcaccatgttggccaggctggtctcaaactcctgacctcatgattcacccaccttggcctcccaaagtgctgggattataggcatgagccaccacgcctagcccacaggttatgagttttttttttttttttttttttgagacggagtctcgctctgtcgcccaggctggagtgcagtggcgggatctcggctcactgcaagctccgcctcccgggttcacgccattctcctgcctcagcctcccaagtagctgggactacaggcgcccgccactacgcccggctaattttttgtatttttagtagagacggggtttcaccgttttagccgggatggtctcgatctcctgacctcgtgatccgcccgcctcggcctcccaaagtgctgggattacaggcgtgagccaccgcgcccggccaggttatgagttttaaacaacctacaaatcggacatttgtaaactgggaatgtttatgaatttataattgtgctaagcaaaaatatgaaatcattccatgtataaataaaatcacatatatcctccaaaattgtcgacaaaaatgatatgttcttcatctcaggccaggatgacaaatgctttttgaacttaaatgcaaactccagtcaattgttagtggctcctagggtactgtgttgaaaatgattctaaagcctgaatgtttttaaaaattatcacatcaaggccacacattgccccactgtctggtcccactgacccacaagccaccaccccacagattggctcggctctggcctgagtcatatctggttcccccagccttgctgctataaagaaagggcttcaacagctctggctgaaggctgggctcaacttcatcaaagtatcccagggatcttcaaacttgaaacaattctgtctgcagaatgttccacatgacttcctgctgactggggtatcttcgagtacaaaactctccagactccagaacgtctgttcccttttgtggtcaaatggacctttcaaaggtttcccaaaccacttctcatgaaccagtgaatattcaaaagagagctagaaatttgaagcctgtacaaaaacttatccctataacatatgtgccataatatacaaacttacaccttttcagtccttcacatctacctctctgaattttcatgaatttctatttcacaagggtaattattttaggtacactggcagcagcatacaagcaaatatgtagtatgaaaacaattctcacaataaagtgagggcagcagaatttggttatgtgtatgttcttttttaatgacttttttttcgtagatatgaccacttgctttttcactttaaaaaataagattctgagaccaggcgtggtgtagctcacccctgtaatcccagcattttgggagaccgaggtgggggtatcacttgagctcgggagttcgagaccagcctgggcaatgtagcaaaaccccatctctactaaaacaaataaaaataaataacttttttttgaaagttgagtgtggtggtgcatgcctatagtccctgtagtcctgactacttgggagactaaggcaggagaatcccttgagcctgagagattggagctgcagtgagctatgatcgtgccactgcacaataatattaaaaaataagatcctgggctgggcatagcaacctttaacacctggagtagtagccactctggaggctgaggcagggagattgcttgagcccagcctgggcaacatagtgagacagcatctctaaaaaaaaacaaataataataataagattttattgatgcctcatttgggtcatattatagttaaataaggagaggcaacagaaaatcaagggttggaaatgccctcactttactgtgagaattgttatattagataagaattacttaaatagttgagtaacttcaatcttgataagagtgactaatgtagaggaaaattttttgggcatagcttggtaaccaaaggagttcatgagctagtatagtaattatattttccaaattcaaattggaacatacgacctcataataatttttaaaatgtataaatttattggtagaaaggtacttggcaaagatattaaaattaaatagcattcaaggatgttttaaataaatcacctttatagataaaatatagaactacagtatatttgctgataattctggaaaatacagtgttgttgatttaaataacaataaaaaagaatttggagttgctggtctctgatttctccaaagaaaagcttttatagctttccagacccaacatccttcctgaaattcactcacctccttctgcttctgtctgaaatccatataggagaggaaacacacatttctctccagattgaggtaatgttcttaagagcagactgtcagtcaggttctgagagttcaatttctagaggtacaaggaagccacttcctatattacctgtaattttagggtcattcacatggagattctgggctctcacccttttgcttgcctgaaatctacccttctaatcatttgcttaccctccaggggctgcttagtttcagcttgagtattctctggtgagtaggcaatctgctattttcatgaggggtctggaaattcttcactggagtatgaattcctccaaattccaggttcattgtccttgcttacgacctttagccccagttgaagacatttcccgcagttttctgcatttagcttcaggaccctctgccaagcccagtgctacaaagtctttttgacttgggcatccctagtcagctctatccctggattagtgtttttctctttttcctacaataaacatagaaatgggagccagtatattagctcagtgaaatctcaaggtaaacctactacgcttcctttattgcccatcaataatcctttcattttgtcatgttttcttgccttttcataccctgatagttatctgtacttaaaggttaaatcgagcttttccactcctcattttttccccttctattctttgatcctacattgaaatcataatgctggacttgtgacgtcactctcaattgtttccagatggcttatcagactgatcaaaaagaaggtgaagccaatatgttagttaaaaagtagatcttcaaacagggagatggttcagaaaaaaaaaattgtgtaataataatgttgagaacacaaaacaactataggtaaagtaaattgccttttctctctgtcctaaaataaaatctttgatcaattgttccagtgtatgaaaatttgaactctaaagagaccaggcagctttctaaacccaaacatcaaaagctttgcttccattagaaaaatttaaacccatgatactttgaatggatttgaaattctctaaaatgagctctaataataaccttcccaaacagaaagaaaaagaacagtaggttatatggcttcgtgctaccattttctctggaacattagttttccaaagatgccattttggctcgtaccaaataaaagggcaaaggttaccaaatgcaagcctagggaagccaggagacagaacagctattacaatggagggggaaatccaagctgtcagctctgaatggatagaaattgcatgtgtgaaattgacaaccagcaacagcatggtaccgtcagaggggccaggaaatgagctcgaccgggatttctgtttactgtattagagctgcggttttgtagagttttatttaagattcacagatacaaatcttcaggtttttgacaactttagtaatgttcagtggctgtttggaaaataatctaaacaaataaaatatcagaatgagaatggtagaactgatacaggaaaaaacataaataaagggaaaaaaatcaaccatcatccaacctcccaagagtctctgttaacaaactgttgcatttgcttcctcatacacacattgttatacaacattgaaaccaatttgtatatataactttgatttctgtttatttagtattatgtcacaaatatttttccatgtcatgaaaatgttttcataaccattgtgtttatagagcattctgtcacatgaatatacagactttaatttacttaaccataatcaattcaactactaactctttcccccaattttttgtcccattccagtatttttcccactgagcaactagagtgatctttcaaaaacttgatcttgtcactctcctttttaaaaccattcaataacttttctttctcttagaaaatattactgtccttagcaggccctttggagctttatgtccttgctacttcgatgtggttatgtccttcgtatcacctgggaatttgttagaaatatagaacctctactccctctctgaactactgaatcagagtctgaatttttacaagatcacaggtgatttctacccaagacaaggactgagaaggtctgctcttcactcttcatgctcctgtgttgcccccaccagcctcaccagccttctcaatgctttttaggatccagcagagacctagcttcagtgcctcactcaaccacgcccctttcctccacaaagccttgccaagtgtatggactaaatgtgtctgttcctccaaattcacatgttgaaaccctatccctcaatggaatggtatttggaaatggagcatttgggagctaattaggcttagattaggtcaagaggccagggtcctcatgatggaattagtgccctgtgagaagagacaccaaagggttctctctctctctttctcttccatgtgaggacatagagataaggtagctgtctacaagccaggaggagagtactctcaccagaacccgattatgctggtcccctgatcttccagcctctagaactgttagaaaataaatttctgttgtgtaagccacctatgctaccagattttgttatggcagcccaagatgacaaatacagcaggtacgtactatgctctctgcctggaaaggtcttctcaggactagtcaccaagttaacttccaattatccttcacagtccagttcaaaaagggaagcgagacttctcccacttcaggtcttcgataaatacatgttcacccaaaaccttgtatgcaaatgtgtagagtgggatgtctcccacttccctttttgagctgggctctgaaggataagcccagtgggaatatccagaatatataaagaacttttgcaattcagtaagcgacccaatttaaaaatgggcaaggacatgaatagacatgtctccaaagataaataaatgttctggaactagatagtaaagcacatgaaaagatgctcaatgccattagctatcaaggaaatgcaaatccaagccacaatgacataccctctggaccctgcaagatgcctacaatttaaaaataataactttgggaggccaaggcgggcagatcatgaggtcaggagatcgagaccatcctggctaacatggtgaaaccctgtctctactaaaaatacaaaaattagctgggcatgttggcgggtgcctgtagtcccagctactcgggaggctgaggcaggagaatggcgtgaacccgggaggcggagcttgcagtgagctgagatcgtgcctttgcactccagcctgggcaacagagcgagactccacctcaaataataataataataataataataataataataataataagcattcatgaggatatggagaaactggaaccctgatacattgcttgtgggaatataaaatgatacagccatggtggaaaacagtctgatggttcttcaacaagtcaaagataaaactgttatatgacccaataattcttctcctgggtaagtacccaagggtaacatatgcccccacaaaacctgtacacaaatgtgtagaacaatattatttattatagtcagaaggtagaaaaaaatccaatgtccatcaacagacagatggataaacaaactgtggcatatccataggatggaatattattcagtcataaacagaaatgaaatactaatacacactacagtgtggatgaaccttgaaacattatcctaagtgaagtaagccaggcacaaatgaccacatattccattccatttacatgaaatgtccagaacaggtaaattcatagacacagaaagcagattagtgcttgccagggggtgtggggaggggagaatgggaagtaaaatagctttataggtttggggttaccttttggggtgataaaaatgttctggaactagatagtgaagatggttatacaacataatgaatgtactaaatgtcaatgaattatacaattttaaatggctaaaatgataaattttgttatgcatatgtgtatactacaattaaaaaaagaagagaaggagaagcagaagtaaaaggaaagagaaacacacagaaacaaagagataaagacaaagaaaccaagataaaaggggactcttgggcgggcacagtggctcatgcctgtaatcccagcactttgggaggccaaggcaggtggatcacttgaggtcaggagtttgagaccagcctggccaatatgatgaaaccccatttctatctgggcatggtggcagatgcctgtaatcccagctacttgggaggctggggcaggagaatcgctggaacctgggaggcagaggttgcagtgaactgagattgtgccactgcactccagcctgggcaacaagagcaaaacttcacccaggaaatagaagagaagagaagagaagagaagagaagagaagagaagagaagagaagaagagaagagaagagaagagaagagaagagaagagaagagaagagaagagaagagaagagaagagaagagaagagaagagaagagaagagaagagaagcttatttattgtgagaacaaactacccagattttttttttttttttggacaactcttaatacttgattatacaggcaatcaggtcttctaaaactttcccagactcttccatgccaaaaagaagtgcttcttccaaactagtccctgggcacggacctactgtttatattcttcctccccaagaagattccactttccacatgccgtcacccaatttgtatgtttagttcacacttcgctgctgagcttggagatgggaattctaattcttcttggataattctactggaatacctcaccatcaattcttacttaacatattcacaattcctccccaaaaacaatccccatctaccactttactattgtacctgtttcaccagttatcttaatttacagaatctgaaacccaaggagtatgagtgagtttttaaagccacatagccagcttagtgcaatcccaactctgaaaggttgtagtcatctttcactcacttccttcatccaggatctcccgttagtcactaaattgtgttgatttttccttcaaatggtctttgtatccatctgcacccttccatccccactgccaacccccctgttcaggttttcaacacctcgcgcctcagtgcctgtgacagctcctggcaggcctctaaatccatcctgcacacaggcctcggtagcttgcctgaaactacagcatgtttgcacagaaaggatttgggagatcatcaaatctgttgcactaaacagagaaaatgccagagccaacacaaacctctacatgatgcctgggtccatgctgattccccaactactaagataggggaaaagaaggaataaaggatacatttcaagatagtcatgacccctcacagactgtcagcagggccagcctcaagcttaaaggaccagcaaggagtacagttctatagaatcacacaacagggtgcccaaagacaactcaagagttgtggttttaagagctctgcaagtggctgggtgcggtggctcacacctgtaatcccagcatttttagaggccgagatgggaggattacctgagcccaggagttcaagaccagcctgggcaacatgatgaaaccctgactctatcaaaaaaaaaaaaaaatatatacatatatatatacacacacacacatacaggaatgcactacaggtggtgcactcctgtagtcccagctacttgggagcctgaggtgggaggattgcttgagcctggaaggtggagcttgcagtgagctaagatcgtgccactgtactccagcttgggtgacagaacaagaccctgcctcaaaagaaaaaaaggaaaaagagctctgcaatctgggtgccatctgcacttctcccatcacattgggtctgcaacatcagaatgaagtaaatataggaattgcctgaaagtgaaggctcccaggattacttctggggaatctggaagccacacttcaatagtatgtggctgcctagcggagggtccttaagtgtagcagaagacattaaactggacctcgaagtgttctaacatcttcattttacagatgggaaaaccaaggcccagatatataaagtaactcacccaggctcactcaaacaactggtagcagcaaagaactaagattacctgcttcccaaattagtgagcatttacctttctattgtgctctatatcagtctctcataattagggcagtagtcccaatagagtaacaattgaaaaatatcaaagcagctctattatccacaatgttctgtcttccacaaactccactcctgccaaccccaggggtgagataactgtcacaggctccctcctttttgattttatgaccctcagaaagcccctttgcaggtgggtattcattgccatacacactgaggagcccaaaagtgtaagaactgctctggccctcgaagagttcactgtcttgaggagacaacagtgtgcacagattctgcctcattaaatacaataatgggggtatgaataaaatcagcagagaaaagaaaggcacacttgtctctgtctatgagggtggagaatattctcagaagtggtatgtgagcaggattttccaggataaataggagttctacagataggcaagaggaaagtgtgtatgttctggaaacacgccagcatgttaaacactggccctcattcccagctcctggaatcagcctatctggggaacagcgcttgctgctctcatcttgagctcctgcccaggaatgccacttcattcagtctgtactaaaattctggtcctcttagtctttacccaccatttccaggaaagtgcttaaaatcaaggcagcgagaagaaagctgctggcttgacagccgtcatatactagttaagcaaatgcacacacctcttccagattctgcaatggttttctgttctcttggcatgaagttattttttctctccagtcatcatgaacccccaagtccaatccaagcttgttaccaaggctccatttcctcccacctagctgagctctctagagcatcatgactcctggcctcttgccaatccacttgaattctgaactttctctaattagtggacctcaaactctaatctttctctcccctcatctctttctctgtctcccctttccctgcttacctccccatcttgacacttttcatatgtccttttccttagctgcgcatggccttgttctgcaacaggcccaaactttacaacaacaaatagacccaaatttagccatttgtagtatctacaaattctattacattcactgacccagaggtactctgaaagattcagaaaaagatatttgttactgaacttaaacatgtgtcctatttctagcccatgctccctgttgtgcactagaaattattatttctaataaatcttataatcacagtgtgagtggtacaattatattgcattacatatttgttggttacaagcatacattttcaaatgtaaacacataatatattccacaaggaagtattaggttatggcagtctccttttttttttgagttttgagacagtcttgctctgttgcccagactggattactgtggcataattatagcccattgcagccttgaactcctggactcaagtgatcctctcacctcagcctcctgaataaccggcgtcttgatgacttagaaagctcagctaggtgggaggagatgtagtcttagttacaggcttgatttggacttggcagttcatgatgattggagagaaaaaataatttcatgccgggagaacaggaaaccattgtgattacaagagcaagccagcatgacctgctaacttttttaactttttgcaaagactaggtctcactatgttgccgaggctggtctcaaacccctggcctcaagcaatcctcctgtctcagtttcgcaaaactctaggattataggtgagccacggtacctggccccattttttttttaatgtgccagaaacttttccccaacctatcttcctccctcatcaccagcaggggtctgcaaaacctggtccccagacactaccgcagaggtgagaatcaaagaagaaagctaagagagatgagaaagcacattaattttcaggttatgtacgaagagtttagaaaccgcctgaatatttataaattgaaagtgcattaattttcaagggtatacagcaagactttgggaactgactgaatgtttataaagtatattgctaacatgaactttaggctaatttatatttttaaatcttgcatgaataatatataagacacagagtgtcctagtcactttggattcctggtgtctagaaactatgaaaaccctttcccaatggcaggatgttataaatgtggttatctctgagacaagtgtcagaagcctgattgatatgtcctgtaactaaattatgcagtactaaatatgtcacaagaagtctcagagtttgttcccttgcttagtgataaggtcgattctaattggggatagctaaagattttatcttcagtctttccactccccttcctgcctcgcccaccgtccctaccctctaccctcctttcagtgcctcttccatgctagctccaataccctcatcatgagtcaggaatttcttctctgaggaataacgggcaagtatttctcatttttaaaactacacctattaaaccagctaaatcttcatcagaaaaatctcagataatagatagaagtcaaccatgctaagagttggctgttaagatcagttttctgttaagaacaggcctccaaatttctactttataactctcagatcatatcgaattccaaggttgtttttttttgtttgttttttgaaatggagtctcactctgccatccaggctggagtgcagtggtgcaatgtcagctcactgcaacctctccctcctgggttcaagtgattctcatgcctcagcctcccaagtagctgggattacagggatgcaccaccatgcttggctaattttgtatttttagtacagatggggtttcactatgttggccaggcaggtctcgaactcctgacctcaaatgattcagccgcctaggcctcccaaagtgctgggtttacaggcatgggccactgtacccagccagaattccaaggttttcacagcgattctcagggcttcaaattcagagacttaagagtgtggatgagaagaagcacctgaacaatttcaaacaccaaatgtcccttcgttaaagactgtctaagcagtctttttctctctcccctagaaggttgggcttctattttgagtttgatattatattgaattcattttaatgagattcaaacagcctgcattaatatagagcccaatgtgtttttccacttaattctatatttctctcctgattgatttcctgccttgcagccatggctatctgtgacaaagggactctgactctttgagcttagtatctgataattgtgattacataatacactaaagagtagctaaccgtagcatttaagccaataataaaatacactgttgtccttctaaagattttgctttccaagattgcaaaatataaatacttgattaatgtttctgttgtaaaagatgatcagaaaatagggatttggaagcgtcttcctttgtgagctctccacatgtgggatatttggaactttataccagcagatgccctgagagggcttttctctaaaaataaacgtctcttgaattcaagtctactgatttatttgattttaacttactttctccaaaaaaaagaccctacatttattcacatggctctttctagaaaatatttcattcagctggcacagtggctcacacctgcaatcctagcactttgggagactgaggtgggcggatcacttgaggtcagaagttagagaccagcctggccaacacggcaaaaccccttctctactaaaaatacaaaatttaggctggcgtcgtggcgcatgcctgtagtcccagctacttgggaggttgaggcaggagaatcgcttgaaccctggaggcggaggttgcagtgagcccatagcaccactgcactccagcctgggcttgagcaactttgtctctaaacaaacaacaaaaattatgattgacttcatgcttaaatgctaaagtatactttcctaagtccattgagatactttataaattgtgtctcagatatattttattttggaaaagcattttttttaaaattttgtcaataaaggagactatgaaaaatgaagtatttcccctaggaaaataagcaacttaaattcatatcctacgtgatattggcagggcaataaaagtggtaggtagagtaccatatcaaaattttttaacttatttcggcaaatcatttacttaaggggtctcctctgtcgcccaggctggagtgcagtggcgccatctaggcgcacttgcaacctccacctcccgggtgcaagtgattctcctgcctcagcctccctagagctgggattacaggcacgcccaactaaattttttttgtatttttagtagagacggggtttcaccgtgttggccagcgtggtccccatcttctgaccttgtgatccacccatctcggcctccctaagtgctaggattacaggcgtgagccaccgcgcccagcaacaaatcatttaaaaaatatttctgagaaaaaaaattaaagctgtagatagtgttttttaaaaatgctgtaaccatttatatttaccctttggctactgtttttttgtttgtttgttttgttttgttttttgagacggagtctcgatctgtcgcccagagcctcccgggttcacaccattctcctgcctcagcctcccgagtagctgggactacaggtgcccgccaccacgcccggctaattttttgtatttttagtagagaaggggtttcaccgtgttagccaggatggtctccatctcctgacctcgtgatccgcccgccggggcctccgaaagtgctgggattacaggcgtgagccaccaagcccgtccccttttggctacttttaaatctaatttctaatcccataattgagttcacagtggtttaaacagatatcaaacatattttaggtattagaactcatgatattgtcctgagaaagtaatggaggccaacttaaattcccttgggattaattaaaggagtcagaaatgattaagactgccatggggatatttgccgtatttttaaaaatcaaatacatgtagctagtaggccctgcaaaacatgtagaggcttagagaaatgaaaggcaaccaaggccccaatgtagggatctcaagggtaagtaggtggactttcctgtctcgatgctatgtaatatcacctaagcacctgctgggtccaagcattccagtttcactgggctggtgtggtgcagaaaggagaccccgcccattgaatgcaagacacagatagttataggaaaattcttctttagcgttcacttgtgtctctcatttcagagcaaaaacggggagttatttctacaatttgcagaaatctctcccttttactgtataatcatgcaaataacatgaggacagttaggctgtagtaaagtaatagagacttttgatgatggttttacccccttaaaatttttataaacaggaattagagggtttaataaaggacacattcattagtgagataaactctgaaggtaggagttcaatttcaggctcggcttcttgccagatgtttgaccttaagtaacgcatttaatatttctaaacctcagttctcttgtctgtaaaatacagatcctattaagaccttccttattggagtattgtgaatgttaatgaaattagctggggtaaatacattaaaaagtctcattcacagtgacagttccaaaattattagctattattatttttattatggtaaaaatttggaagaagaaacagttattttggggggatatgcctgggaataaagagtcaagaacaacaaacaatatctttataatccattaagagctatgccaatgtttgcaaggtttccttcagcaggagaacattaatacacttaaaaaataaaatccaaaaagttcttttagagaatagatgttttagattaattctgtttgttttcaaaataaataagaaccatggtaatgaacctcaaaggtgtattgtcttagagtttctggctttaatattgtaactgatgacattaaaggcaattaatccattaattaaaaatctgcatttatgcaaaggagaggggaaataaactacttcaactagcttctgacatatttacacttgaaatcaaagcttttgttaagttaaactagaaagagccgtttaacataagaaagagttaacactcgcttaggggtgcccttttttttaagtttgttggaaaatacttgacaaatctgtctgtaaaagcaactgcaaaaatattgtcactgcccttttgacagtctgaaaaaatcatggttgtcaaaataataagcaaactacattttataactatcaagagaaaaatatcagttttctactttataaagttgttttttagcatatcctagtgtgtgatgactgactaccatacagataggttgataatgtcaatacgtaggatatcttcctaaaagaatctaacacaatcccaccttccatttagcttgcagaaatacatcggcctactgagtaagcaaccaggcattgcggctgacttaaagaacatctttatgtccatggaaatgaacattttttaaacatctgtaagccctggtttcttggtaaagacagtaatagtagtaagtttgagtggccagctgttttccatatgttactcagaaacttttacacaagtacttacttcctggtagtgttgagtgagtgctagacctacattaccttccttaaaatgagaaaggaaagtatgtcaagggactgcattctgcttctgaagagctatgtacttagcaagtagtttactcagaagtaagagcctacagcaaactgatttcaaaagtcacttaatctttttagacaggctgaacatgtcgttccagaagcagcacgtgtaaattctcccaagacaagcaacccactgacactggaaacttgtgttgaagacctatcatttaaatgcgttatgctaaattctagagagaaaggaagcaaagatgataagatacggtttctgcccccaaagagttttaaggttttaaagtaaattgcctttgaggcctaaaagaaactttcccctctcctccttttcttgcactgacagtttttcgtttgtgttttttaacagtatttcttttgccctttgtatccatctttctattattttctgccgtgttggttcaatgattatgattttgctgctaaagtttttatttcttcaactcgtctgagacttagctttacattaaaacatttcaaataaatgtcagaaaagcagtgttaactttttaagacttgatcccggttgaggggcaacgtgcccttgttaatttcccaaacattaggtaaataagtgaggcgtgttcctgccctgtattctaattgtctggcaagaaaaattttcagttcaggatgagatgtttgtctcttccaaaatctatatagcattaatctcattgagataccccaaaatcccaaatctgaagtattgaaaaaaatacataaaagtaagaaagggaagtgatgtatcccctgggatctactctactttttacaataaaatgtggctataagaaaaaaaaaatcacattatctaataattattaagtaaagctctgttgtgtttattattacatcggcctaacaattctcatgccttttaagcactctgatggcttaaagaagaaatactacataaagacataaaaaagaagaaatactgcgtgtctataggtattttgtgcatctaaattcacactgacttctcaaattatatagcgccaagaaaacagaactactccagtttaagagagtctttgccgttctgaatattgtttctaataaaagtacatgctattattgagagaaagctataagagctaatggattaaatgttggggtatattcccaattccaccaatgactgagatgttacccttatgccttcctgggcctcactttgctcctctctaaaataaagaaatttaattttgtctattattccttccaaaagcaaaattctactgcatttctgagacatgtgtgatacttacggctgcgttcagttttccactttcattcatactactcaccttaatcagggaatgtattaattacaaattaaagataattatttgactcattaggtttagggtatatacatgtcaaataccctcaaccctccctccaggtatatcaaacaaaacctcgagctcctactgctgaaattcacattttcctcttacttgatatcaacatgttctatttttatgtctcataaatttaattatctgctaaaatgaagactgaagcccaatgccccaaacactaatttccacaaatacggattcagaataggtttctaaaaatttcagtatcctatttgtcacaattgtattgaatctattatctttcattaaattattccgtgtgtgggtcactgttttgccctaagtgatttaccacccaaccttgccctcctaaaattatttacagtgcagctacacaaccgttttcagcatgctttaggcttgtacttcctggagggaacttcacttcagtgacaaaactattcatctgcgatgaacactaccactagctccagtgccacctcccatgtagctatgcagtcactgcaaacatgagcaagcctaatgcttgctgcatcgcacgtgatttcatttaacaagcagtaatttcccttttctctctgagaatgacttggttcaatgtaaataaaggccgtaaagtttagttggaagagaataagagaatattggaagttgtgtagcctggagtaattgagatatgcaggatgttccaagttacaagatttattgtgtatctacagacactttatgatacaaatggcaatgagctaatagttatacgtgcttctggtgtcatagaactttagatgtcatttgtcatttatttaaaggacaaaactgaaggaagttaggttaggtttaggaatcatcaaaagaaaagaaagtgtcagcataaggagcatcacaggttcctatatcctataagttataatatacattggagatcagaactttttcttttctatttctaatatttagattacagatgagctcagaagctaacctcagaaactattttaagaataaaacattccatcattgcaattgcgggaatcttattggcaatcattatttgcatgttggaaaaatggtggtagcggaggtgatacaaaaaggagaaatctaatgctaccattttgacttacttttaccaagattaaacatggccatcacaaaagattggcttcctaaactgtggacatcttcccagttcttataagtaagggatggtttacctcaaaataacactgaattaaaagtgacttgtgtccaaagagctaaagtcagcacaaattataacagcccatggcttgctgagttctcacaatttcaagcatttgcctaaggccttcctcactcacttcttctgtactcacactagctgacttcgggggaatccagcagtattgccggcccccagtggcacagtggcacagagcagcctgcgaccacgaagatgccggcagatccccgtcacctccctccccaccaagtgtgtggaggggccagctctctccgcctccctgatcatttgtttactgtgctcaagttgggattcttggccaataggcagctcaagggggaaagaaacacggtgtcttaagtgcattaaatcttcatattagccccctggcttggtaaacctttatgttggctttgttctctttttttcaagcatgacaaacaagtggtttttctttttcactttaatgattctttaaacaaaaaggggtagtttagggctttctccgaggctgataggtgtttctgtttaatgaggtttttattatactgtattggcttccctgaaaagaaattacgagcagcaaacagctgataatagaaaaaggctggaagaaacaataaccaagagggggaaaaaattagtgtggcagcagatgcacgcgttgtagctgcgggattaaatgccacttccattctcccttggccaccattgtgcaagtaataaagtgaatgtggacacttatgtgccagttatgtgtgtgcaaaagatatagatatagatatagactcagctaaactgccatctgtggaggaagaaggctggtgagctcagtctagacaaagatgagtgaagctcagagtgcggggtttacaagggctggtcggttaccatggaaactaattggagctaataagtaaagggacattttaactgtgggaacagaataggaggggctatttttcaatatcaccgttacctacaattaatctttcattttaggagtgtctttacttaattcttattatgaagcgcttcactctgtgcacaacctcaccctgctcaatgtacttgaaaattcggcatatcatcttttagaatgtgctgtattttaggtttagatctttcaagacagaatcaatttcacttttttttttttcttaaaaaataaactgtttgcagatggcaaagagaaaggaagggaggtaatggaaaattcttaacttctaaactgacactccgctgagcactaaagcagactacagagagaaggggagctgggaccttatcctgcagcaccaacttcaggtttttgtttgagttgattttccctaacaaaagcatttcagaacaacaacgaaaaatgtgcctttgtggacttactcttacaatactttccaaaggtagcatttacagctactgcagaagcaagtattaagatcatagcaaacaaccacatctattgcatccttgtattttttattttaaagcaagtattaaatcgtgtaaatagctgaagttatcaataaaagagaagcagtgactgagttttaatgaaaagatctacaattaataatagaataaaatgtccgtgttaaaaagcactttaaacaataatgtaggtcagaaccaggcccatttgggaatgcctcatagacagtgtgttacaagcacagggttgataaagcttcttgattccgcatctgtacagtttcttaggttttacttttgtaactcaatttacagtttaagagaatgcgaactaccttaataatgtctctggggtcttcaaaatctatgcagttgaggtaatccagatttccagacatgggtctggttggattaacccccctcccgccaaaacaggaaaaaaaaataccttacaataattggcactattaaaaattttatgatgcccaagggaagttagagccccgttgtgccacttgccattgttgaaaatgtttgtgttgattatgtatctggacttagctgattaggagtagtttagtgaatacacaatatattgtgaaacagacacctcataatcacttctgagaagcaattgagcaaatgaatcaggactttaacttctgattctttttcttccctccttcttctttataactcaattataagaaaaaaatgcactgcagaaaaattagttttctaattttgtacatcagaaaattgcacccagaataatttttaagtatcttaatataataccacacacaaaaattctggaaaaacacaagctagtcaaatcaatgttgctagaaactgaaataattctccttgtgatactagcatgcccatattagataactatttatagtctaaattttaaggcattaggcaagtttaagagtttttttgttttttttttaaaacaatccccctcccagttcaaagaaatacaaaaggtgcaatacttaaaatgttggcttcccacagacactgtcaggaagttggtagtgtttaaaattcctattttctctttcagtttatcaaaattccttagatatctgatggaatttttgaaattgtgagatttgtggcaattaattgatttccagatatcttcttaaagtactgtaacaagtatagccattttctggttcagactgctgtcaaagtacttactttcattaaacagttcagaaaaccaaaaaaaaaaaaaaaatgcccctaagaagaaggtattgaaatgaccaaaaattgaaaacatttcaaagcaaaattgttaatgagctgtttgagctatatggacattataagtgcaattaactagaagccaataaaaataatcaatgacagagtgcagccctctggtaccaaagtgcttttacaaagagatgtctgtgaaagcagcaagtgattaaaaaagccacctttatctatgggagcgcgtgctattttacatgagtagaaacgaaaatgattttcattgactatttctgaagttcagcctgtggcaaacagtgaagagctgtgtgtgggaatagagaagtttctgctcttagctgcgcccccaccccctccttgccaagaatgttggaggcagccacgatctaatcaaagaaaggtaggagtttagatttcaaaatgtagatgtcacatttcagtgccaactactcctacattaaccctttatcagcaagtcaagatgaaccttttatctcctatggaagggaaaacgtcttgctgagatggcccttccatagacgggcagtaaaaatgtttagggtttctgtgcatcccactgagggtccccatcatctcagggggagcacgaggagttgtgaaaagtaacgcacaactggtcatcagaataattcattccctccaccttctctgtagcacctcccacttctcctctttttatagcagtcctttctctctgaaaatctcaggttacttgactgggagttctcagacctccagtttcagccctgccctcagcctccaatccgtaagagacacccagccccagcaattggattgggcagcccgtcttgacacaccactgtgctgagtgcttgaggacgtgtttcaacagatggttggggttagtgtgtgtcatcacattcgagtggggattaagagaaggaaggctgccttgctggagctgtgtggtcttctccaagtgagagtcgcaggcaatagaactactttgcttttggaggaaaaggaggaattcattttcagcagacacaagaaaagcagtttttttttcaggtaaagtaaaagacattgaatgcttctctccccctctctcttttagcatagttttgaatggaatgctagcacggcacacttgtcaaagccagttgttgctgtcctatcaatgctgctattgtacggctgacagatgacggtgagcatagcttgatgcttggctgtctttgtagaactaacactcctcatgccttgcttttgaaggtgtagctaagaaaatacctttgggagccgcgtttgtaccttttcatatccccgttgtatactcaaaacaggagctataacttgcttgtagaggatagataaggctgagaaaggatttattttagctttcaaaattaaaattcactttcaaactgttgcattttactgctcaatttataaagattctttgaagggtctattactgagttgctggcagaggtggaagtgctttcttcaccgatttgtgcaaggtagattatgtctgatttatgacagagcaaagggtgttttaaaatatttttggagattgactctgaagtttggaaactcctgaagagaaggggctaccctctgaacagccactaggtcggctttaaaacaaaaatgcttagagctggaagaaaagcagagaaggaagaaggaggaaaatgctctttaacatagccctcttgcagctgcagggaaagcagatggaggtaattgatttgcagatctgtttgtgaaagttttacaagtcatggaaaactaaagtagcatctctgtaatggatcattaagagtcactacatttataggttttagaccggctaagtgaagtgttaattaaacgtaaatagattttcaggtttggttataaacagacaaacagaaaggatttaattataaactagtcattggaaattaatagtcatctggtgcctgagcaacacaaaatgagttgtcatcatatatgcgagtagccgtaacggctctaccaaaagcacccaccaatattgaattgaactatttataaatataagaagggggtttatatgctatgtttaatttatagtattaaaaaaaaggcctttcaattcaggctctattttcacagggatcaaaacataaaattttttattttccaaattttctagcaagataggtgagccaatgagacttctgctaccctaatatacttgccctccgatagcaacattcatatacctgtggtatgcagagcttctggctcctactggactttcacatttggcagagaaatccagcattatcctcaccctttgcaggtgagagattctatgaataatattgtatataagctgttctgaaataagagctgtttggtaggttgaataacaggatttatggctagtgctttgtgattttagtattcgattgcataaagatgcctgtaaaattatgtttcaagttgcattatacatatttttgcaaccatgcagataatttttttaaaatcctttttttaaaaaagttaagattaaaacaatattttaatatggtctttaatttttattcaaaatgttctccagttatactctcaaacttctccttcaatgagaaattatcctcataaatacccaggcagttattccgactgagtattatctgattcccaatattacataaccaaaatagatccaagttcataagctgaagtctttcggagttccagtcattccattttggctttacaatggaaatgaggttttaaaaaataaagacagaaaggcaagctaatatctcgtgttgtatcaggattagaactacatggacagcatatagcatgcatggtgctaactaccaataccatttttcactactgcagaaatatttcacaagaaagtcaagtgcctcctcacagatcggattttcctccctgagatgtggcatgatggcatctaacagaggcaaggtgctatttagcaacaggtgccccaccagcatacatccctgatgttgcagatcgatcacagggctgcctggacaggactttgacagtatgggacaattcccctgaaaaaaacaattgtacacaggattaggcaggatagaaacaagaaaggaagtgtggagagataataaattcacaccttgaaacggcagccgtgtttttgtccccctaacagggtaatgtgaagttacttcgtgaactgaaagggcttgcttgaaacacagtgtccacagggcaatcccagcttcttgtcaaaatcaaaatctactgtcccaggtggtaaacatgcagagacatatttatggcgacctctacatacctcagtttgacatttggtttcttcctgacagcacttgtgctggtaatacacatgaagttcccatcagcattctaccagctgtgaaagtgtttgagcacacgggatatcccttccagagaagcgaaaaataatggaggttgaggagatctgaaatgtgcactcggtatgcattaaggtgacagatcttagaggtgaaaagtgatctgaaagcttgatttgtgaaagtgacaaaattcatttttatggtggtgtgcaataccaaaatacattagtccaggtattcactgaatccatggtaggttatgagtaggaacctccatcaggaaactagaagggttctactctgttttccttctaagaaaatgtaagtgacttcatgcagattgttgtagccatttccatcataatagtagagacaagtggcaaatgggacatttcctatttccttccctaattatgtatccatattggaagggttagaggtttgtttcttctgtgttttatattgaaaatgggtttattctttaaaaatcctaggaccgggcacagtggctcacgcctgtaatcccaacattttgggaggccgaggcgggtggatcacctgagatcaggagttcaagtccagcctggccaacatggtgaaaccccaagtctactaaaaatacaaaaattagccaggcacggtggtgggcacctgtaatcccagctacttgggagtctgaggcaggagaattgcttgaacccgaaaggcggaggttgcagtgagccgagatcgtgtcattgcactgcagcctgggtgacaagagtgaaactccgtctaaaaaacaaaaaaaaccataaagcaagatttctgatactgagctatatatagtattgagatttccccaaccatcgccacatagatgaggccaaccaaagagtcagctcaggacatccggttttttttcccctgtgcaatatttttgtgtggagaacataaagtaaatttaaggggattaaaatttttaaaaccagactctaaatagatggtcgcttttatcattattgactttggggagaaggaggctcatgtatgaaactaagtctatgatcatgtggtaaattcagcttttatttaggttagaaccatgaaaatttttgaaaggagatatcttatggaaaaaaattgtcctgaaatatgtttcctatttaaattctttttaatctatcttaatatcctgaggaggtggggaattcgccagttagcctttttttcccctctcatattttcctctcccctatagccagtctgtcatcaaattctgtgagtccttcctttaaaatatctcccacatgtggcccatagctaccatcccagcgcaatgatcatctcacatgtgggccattgcaacagcctcctaaatggtccacttgcctccatttccctcttctgtctactactgcagactcagcttcctaaaatgtcagtttcatcaaagctcttctagtctgaaaattaccacataaacccttactacccataaaatgaatttcagtcctattctaatgtgctggccttctattatttggcccgaactttccaaccatttctccccgccaaatccccacaacctcagaagtctacccttccttccagctaaagtgggcagcacagcatctctactttctagccttttctttcagccctaaccactctagttttctatcttgtctttaaaatgagtttgtcatcatgtgcacggttccttctaagtctacattcataagcctgtgtgtaaaatgccccactcagttcatccttatcacctctatatattcatccttcaaagtttcagcttaagttccaccgcctttgagaagcctctctgaccgctacctcttccagcaatgcttttcttcccttcatgttgaccactggttatctatggattgcacttaaaacaattgctttattttttattctgctctatagtttgcttctttattccttgacttctcaggtggagtgacagggactggcctggtccactttaatgacccacagaagaccctaataagtgtgcttactaaactcaccaggacattcgaacactcaagacactttcctctctagagttaccccaatttagagccattcactggctccggtagcttcctccccacccaggacaggaaacgaaaaaaaaaaaaatgaaactcagtgggttttatttgggggaaacttaaggaaaatgcccctaaggcagaaagtgaaataattgccccagattaagcttgagtattatatgaaaaatccctatgaagttcagctttaactgtagtagaaattacatgtattggctgctgctctatcataaaatcccaaatatggctttggagcaggagagtacaggctctgggttcaaacagacctgtgttctaatccagggaccacctctctagctgtgtggccttggacagcgaactgacccattctgagattcagctccttcctctgtaaaatacagataggagtacttatcttgggaacattttaaagaaaacacataaatcacctagctcagtgcatatccaatattgtatgttcaataaatggaagtgagagagggttgattggtgcatatgtagatccagacctaggatgcaggaatgacaaacgttcagctatgtcagtcattaatcctatgtatctatgatgtgccttcctttagcattttcttctgccaccaaaggcaggggaataaggaaaggagggagagagcaagggagagaaagtgagagagagagagagagagaaggagggaggtgctcttggcatttagggatttggagcaactgagctaatggctctgtagggacagtagtgacagttaaatacacgttgagggagaaatgaagcatgaagccctgggtcctgcaccaaggataataaagagcaggccctgggccactgtgctatgctgttggggaacaaaggaccccatccctgtaccatagcagggatttggattctctaagggtcatgtgcttcccttctttcctcctggctcaccatctagaaagaaatattaataaaaacttggcaaaacattgtagagagtcagatcgagcttccagaagtaattgataaagcaagataccatttagacttcaccttcaaaccaaatttaacaaaaaagctgaaagcaatcagcttgagccccttaccattcccaaactctgcacccatcatcaaacattgaaccttctatttctgccttttccctggaagggcagctgactgtgaaattctctaacaaggcactgaatgccacttagcaaatatgtccttagacattggatattcagttctagctttctgatcatctggtctgcacctgccctcagccagggagaggaaagaaactggaactgcctgggatgatgggtaaggcagtatttctggagatccctccctctccctagcaaacatatctatcaaattttcaaagagaggcattaacaatcacatttgacaccatcgtcacctgtagccgctaagctagtcttcgttgccctctaaatatgtggtccatgtactcctgcacagtagtgtattaaactttttaaattttaatttaatttaattttttgagacaatgtctcactctctcatccaggctggagggcaattgcaagatcatagcttacagcagcctccgtcttctgggctcaagtgatcctcctgcctcagtctcatgagtagctaggattgccagcatgcaccaccatacccagctattttttatttttaattttttagagactgggtctcactatggtacccaggctggtctcaaactcttagcctcaagtggtcctcccagttcagcctcccaaagtgctggtattacaggtgtgagcaaccacaccggccctaagccacttttaattaaaaaaaaaaatgtagctcttcgctttaccttcaaaggttaaatttttcttttgctgttttatttttgtttttgtttactacacaggtacaaacctgtaggaaactatgtctacgttttctaaaatatgaatctaagggacttggacatgctactgtttaactgctgtcggtgagattaatactaaatctctgtgcggaataaatgaacagacagattgtgtttctcaatcaaaagttttaattgtaaaaggtagactctctcaaaataaatctataaattttgggtcgtactaatcaaattctaaaataaagttagaaggcttgtgatgggagtggagtttgggaactggcaagagtccacatggctcttgttgaatataaactaaaaaacattctaaagctggatggacaatcaattcatgagcaagcctagacattttcataaaacagtatccttgtaagatggggatttgtcttattacatatccaatcacattataccataacaattgaattgtctgttcttaagcaatggactctgatgtagatttcatctactgtcatgtagttttcctcttgctcttctttgttttgctctattcttttgttggcattgaccaaatcttcagctgagcaacaaactgctgtaaccagatgctagttctgttgctagaattaatggaaactctgaactaatttttttattttgtcctatgatctttccaatcagtaaatagtgttactaatacatgcaactttttccacttcatagtacgcaaataatttctgagacaggtttgtttcaagaactcaggaaaatctccttgtattcctttgatgacagaggctcaaagattattcagtctaagtgtcttcccattttcctgaacaacactggcacatttagcccattcttaaaaaccaaaatggaaatctgaaatacaaagagttctgtttattgtccagtttttttggtatgatgttacaggcataatctgctatattaatttaaagtaaaactaaaggttacacaattaaaagatattagctataccagaattatggtgggaaaagactaattgcattccaatgtacatttattgatcagttactttagaagtgtgcacctctagatattatcttcaaactcctatcacaaatatgcctttgcttcccaatcacctttctgtcatataacatgtgttctgaatagacttcttgccaatttaaagtttcacccttaaccttcacctgccaataatcaatcttctcctgaatagaatgtccctgtaaacagatgtgctttaccgtgcatccagaaattcttgaaaccagcttttaactttcatcttataaaaagtgcatcccacaaaagacaggccccctacaaatcatgttctctttttttcttctgagaactttatgctggtaaaagaaaagaaagttttccgaatataacagataaataaaagcataggacatgtaatattttttacttgggatgcctagaggctttacatgtgttatcacattctttttcatatgtgatattgagatttagtaaaggagatttatgatatggacccaatatcaaacagattaaatctttttattttactttgactcagtttccttctctgtaaaatggagttaagtttatcacaaaaggttgttataaagattagatgagataataaaataagatgcttaacacagaatatagaacagagaaactgcacaaacacaaaacacaaaagctacatttttgttccaagatggcaaaagacatggcttgagctgaggcttggtgataaagtgagtatgtccttttcaaataaaaatagcccttcttaatctcatgatctgtatgacacaatttggaaatataatgaaggtggccacttggcaaagaagagaaagaggaagagggagggaaagaggatagaggcaaagaagagaaaaaaaggaatggaagaggaggggaaacattgtgatcctctcttgcctctgctctgtgccttgctataataagcatttcatgtcatagctaagtcaggccagattctagagtgtcctaacacatcaggtagagaggttggacttgatagctaaacagatgccttaggaagttcaagcagtaggtttttaagaataaagagagattaaggaaaaatgagagtgacagtgagtgagcagagacagagagagaaagagagagggggataacaagacaattgatccccagagttcaaataaattaaaaaaaaaatgttgtctattcccatcgacgcagtgggaataaggaaaggatgggtgtaagaaacatggtgaagaaataaataacaataatgcaacttggtgattagtcaaatagaggacaaaagagagaaaaatactgaggtatcaagcccaggacacagggaaatggtggctcaatctaaagctactgaaaatggaatttcattcggcaacacaatacattcccaaagtgacaatggtcattatggaacaaatgtttatctgttatctgtgaacagactacactcaatagaactttataatgcaaacatatgtaaatatatgtgtatatcaatgtttaataatatatgtgctgctgaagcaagcactcaatgtttaataatataatttaaatagatacaatctaatgttctgatcattggtgggcattagacagaatacacaactgtgattttcataaggcatatgccgccttagatttaaaaaaaaattttctcagattaagaaaatggttggccaagtaacaatctagcatttctataactttggggaagttacggatattcgagtcaaaatactcaactacatctgcataacacctatataattctcttcttttgactaagagactgttagtggagcggaacatgaaatttaaaaagtctagaggcaagaagagatgaaatatttaagttgcctatgctcacaaaccttcatattctaccttggaggaggctgattgacatcctttcacagaatgtaccaatgacttattcacaaatgaaatacacgttcccttcttcactacaaagacaaatcatccttaattttatgatttgggaatggtttccccattcccctgcttttctttctatccccttttgttttgtccttttttgttttatttgtttcaaccatttcctattcaaaataagagggccattctctagtcaagtcttcctactaaatcaatgggcagttttcagaactaggtatagatttcttagaagtagaagattgtgtttgccttttcaaactcgtgcattatatgttggaggcagcatgactgaaagaatacagagcttgagtcagcaaaatctggaactgaaatgtagccctgttactgaaaatttgtgggaatagcattgaccatggagacttgacagcattttcgttcctcaaaagagacttgggtcccattcaagtttttaatgaagactttggcctgttctatgttacccaactgggttttctgaaccatattccctagttcccctggaagaaacgccagcctaagtatcagcacctgtaatctatttctcactcagggttgccagacatgagggattaattgacatgagccagtttatatttggaagccattaatggctagcaactgaattgttgagacatccagtgcaacgaaccagagaggaaagaataacacacaagtgccatagttagatcaataaacatcatcttcggcaagcacaaacgttgggtttagctgccaaacttaaaactaggtctcttcatctagtacccacttaggtcaatgggccagggtcctggtatagagattagggactgaaacatgagttgatatttccaaacttcttaattttggattgtctaagttcagatttcaattcaagattctactcctacatgttacgcttttagatctgtcttggaggtacaaagacttctggaattagagaagtttggtccttctaagaagagaaaaatgaataagtagagaagtcagaaaaaagaatacaatgcagtcaaaacatgttctgtcatacagagtcaccttaccttttcgatgtaaaaaccaggacagaaaacggggggaaaaataagctatatgaaaaacttcatgtatagcaattgttattctcattagcctttcttctacaaaaatagctgtctattcatctaacattctggtgaactactacagtagtctcagaagtgaaattaaaagtgttcctacaattgcttctaccactgtcataacccctttggaagcttagaatactccacttaacttcctcatctgcttcaggcaaatcatatttcttgttgcgcaaataaaattaaaatgtatattttattattcccctggtaacttttcaagtctgaaaaaataattaagcacactattagcaatgaaataaaatttgctgaataatgacagcagtgttggagccaggaaaaagaggcagggtggtacagtggaaagatattagaaatctggattctagaacttggctactattaatagtgtgattttgagcaaattagttaagatttcaggagcatgccatcatctctttgcctgcattctgccattcccttcacctagatggcattattctccttctttactggcaaactctgctcttcctttaagacaagcttaaataaataaagcattctcctttgtttttttttgagaaagtgtctcgctctgtcactcaggcagggtgcagtggtgtgatcatggctcattgcagtgttgacctcctgggcttaatagatcctcccacctcagcctcccaagtagctgggacctccagcacacaccagcctggctaaatttttcctattttctatagagatgggttctccctatgttgcccaactggtctcaaaccgctgggctaaagcaatcccctgcctcagcattccaaagtgctaggattacaggtgcaagccactgtacccagcctaagcattctccttgaaactaaaaagaatggttggaggaaagaggaaggacttcaatccagttctgcatcacctcgtgcatctgaaataagctctgtaccttatctctttcttatctccactcatcttacctactgccattaaactcatcttatttctacactgtttcatcatatcactccactactctaaaacacctgtctcccaattttctgcagcatccagtctaaataaatgaccagcaattaagaacctccatgatcttttccactatgaccatcccactccccctatacactttctgctctttcctaaagtggttcaacatgtcctgaatttacatctttacttctgctacaaggcacgtgctcacactgttttctgggctaggactgcctcccatcatggttctgcatgtccaaattccatccatccttgaaaagaaagactcaagcctcattacctccatggaactttcttttcctaactcttccaaccatcaataatctctctctcatctgtgctctttttccacttaaaatcttgtcacataattttagctcttaattatgtacaattttgcatttattcttattctcatcatttttttaaattgccttctctctcttatattttgagaaacagtaagacaagttgagttttgagcctctgcatctatcaagcatagcttcaaggtggtagagccagtacatcctaaaggccttcattacacattcacagttagaatgatcaaggactactgggatagaacattatattttagtcattgagaattttaggaaactaatcagcagcacattcacaactaccccgggcattcttttgacaatgtggaaggcaccatctcatgcactgattctctggctcagattttttgtttccatcttctgcccacatcactctccagggctgcatttgcgccagctggattccatccagaaacagattcaaatagacaataggccaactagaattcccatcttccttgattagatgtgaaattgtatagctgggtgtcactcacatgccagccactcaggattctatgttatcaattaatttctcttgagagctgaactgaggagattgtgacaattctgttttcaaggacctgtaaaataacagctagaccagatttttatggatagtgctagatatataggcctgtccactatctgccgcatagcataaattaaaacaccctgttaatttcatagtaaatcgtattgggtgtttttttcttctgcagtgtgaatggattgtaaaaattttgtctaggaatggcattctcatttgtaggacaattagcaactgaggtaaaaggtttatattacttagaagaaagacgaacttattgcacactgtcaaaactactgaatcttatttgttgttgttgcttcaataacttagaatttgcagtggattttccaggaaaggatatcatagaaacacagaatgttggaggcgtacctccaacaatctaagctaaatctaagcagaatgttggaggcataccttagagatcatctaagcagaatctctcagtttacatctgaggaaacacaggactgggtttgttgggagacctgcctaaaatcacaaaactcattcttacaaggcagagttctaaatccaggctttatctttctaaaaagtatgagtcggtaaattctaccgggatgaaaatgagttcatgtgtccactttacattgggacccgacaaggaaaagagatgagtccagctcccttttcgaccatggactttcttgctgagggctaccgtgagtaatcaggcagtgtaaatgatgattgggactggaacaaatacaagaaaaagctttttttttttcagatgtactccttatggaaaatctgttctaattgagatcaccaagcaccgttgctatggatgatctgtgcaaacatgcagctttatcatagagaaacttctttgtaaaagcattttttaacatacacttaaagaacacactatccactgttgatgatgacaatattaaccattacgacttcaaaacaattttcacttgcactaaaccactggaacttgtaatatttgagtaaggaaagcagtgtgtcatttctgtacaccagaaaactgaagctgagggacagcatgccatttgcctgagtctaaacacctgagtgaggtaattagtgttagaactcatgtcttctggatcccacttcactgcctaatacttcaaatgatttcaaatataccatatttggtcaatattagggatacctattgcattagaacagttgaactgtccccttagtaatgtcaccttactgggaaataaacatttgaatacttcctcaagtactggaactttcccaagagaagtatatgagcaatattcttcatagcttaataaattacatgattgtatatacaattatgcatctatataatttgcatttgaagctgatttatttgtaaaagaagtagcagtattcattattagattataaatgtatttcctagtcataacttccatttgttattttgtactataaggaataacaatttaataactcaaaataaaaagattaatttagaatatcctaagtatgattctgactttttaaaaaagttttgtttttcactgcatgttctcactcataggtgggaattgaacaatgagaacacatggacacaggaaggggaacatcacactctggggactgttgtgggatgggggaggggggagggatagcattaggagatatacctaatgctaaatgatgagttaatgggtgcagcacaccagcatggcacatgtatacatatgtaacaaacctgcacattgtgcacatgtaccctaaaacttaaagtataataataataaaataaaaataaaaataaaagttttgtttttaagacatgttctagatttcctttttggtgttgtaagtatctcaagaaagccattatgatttccagagcaatgaaagaaatacgtcataggaaaaagagcattttcgttcatatttttaggttattggtcatatttcaatccactggaaaatgtgattgcaaatctggttagatttataaaaatatcaggcttaccagtattacaacttcttatgaaagtgtgaattctgttgagaatgtgaagataaagtggcagaataattatctttttttatatctaaactttataatagtgaatgctgttgaaaaagggattctatgaaagttattttttgatccataagaatactttgttcatactattttccttttcttaaatttccaatttttattttaagtttagggatacatgagcaggttgtgcaggtgtgttccataggtaaacgtgtgccatggtggtttgctgcacagatcaccccatcacccaggtattaagccaagcttccattagctattcttcctgatgcttttcctcctcccaaccactcaccctatgacaggccccggtgtgtgttgctccccgccattgtgtccatgtgttctcatcattcagctcccacttataagtgagaacatgcggtatttggttttctcttcctgagttagtttgctaaggataatggcctccagctccatccatgtccctgtgaaggacatgatctctttcttttttatattcatactattttcagctaagcctatacattagacacttctataaaacagtgcttccctatttcctatttatatctcagttgttgtttataatgaaaataaagtatgccattttcactactcaaagaaaagaccagaagaaataaagctgagctcttactaaactcttaacagctgtattcttgatcttccattgagtagcaactgctctttagtttctatcaccttgcctcaaacatggtcataacctccaccaaaaagaccacataaaatagcaaactgttgaaatgagaaagagcaccaagaaaagatgtaagtccttgcaggaggaatgcaactcaaaaaggatgacacagagggtgagggcatcagactcttttgctctcaccactgagaaaaatttggcactataaccggctagataatgggctctcttcatttgcactctactaccatttgtaaatcctctgaagttttaagtaatttgattttccccatagtttatgaaatatacaacctttagttttatataacaatttatacttttcaacatgcctttaaacatttcatttggttttgacaaccttatggatcatgccacataactaagtacttgtgcccattttaaagaaatagaaacagaggcacatctttggtgacacatactgaaatattaatgtatagtggtataagatcatgatgtgtgcagtttactgtcaatagttcaagggaggaatatatatatatataattttataaaatctctgtttgtatatatagagagagaggggcagggggagggaatgaaattgataaggcaagacattggggcaagtcgttaaccataaatgactatgggtaactggtatgtaagtgttctttctactattcttccagcttttccgtaagtttgaaattattttcaaatacaaatttttaaaaattaattaaggaaaattaagtaatttgtataaataaacagctgattagaggcaaagtgaacaactaggatccaggtctcctaactataatctatttctgtaaactgaaagtaatttccacttaaattatagtcagcccttcatatccacagttccacctcagtggattaaaccaaccttggatagaaaaactattcaggggaaaaaaatacaacaataaaaaaatacaaattttagaatacagtatattatatttacatagcacttaccttacattgggtattataagtaatctagagaggattcaaagtatatcggaagatgtgtgtagattatatgcaaatattatgtcatcatatatcagggacttgagcacccctgattttggtatctacagtggggctctggaatcaattctccaaggagaccaagggaacgagggagactgtatttataatcacaatcatacgttttgccagtcagtcatcaataatcaataccatagctcacgagaaactcataatgatttattaataacctttatttatatatcatactacttattgcaaactgttttcactgaccttattttatttggtcttcataatgcttccaatgaagtggattggacaggcattgtgggacccattttacagactaagaaacaggctgtgaaggttacttataccattaatgttcacagctactaaacggcagaatttagaaggatgccaagagagaatactggaaagagcactggttctggaatttaggatttaaattccaatatgccttcttagcattctaatgcctttttatactcctactgaccatacctaaaacttctagggctcgtattatatttcgcaatagaaaagcaatgttcttgccggcacggtggctcacacctcacctgtagtcccagctaatcaagaggctgaggcaggaggatcacgtgaaccttagagttccaggctgcaatgagctatgattgtgtccactgcaacccagcctgggcaacagagcaagaccctgtccctaacaaagcaaaaaacaaaaacattctcttaaagaacaaaacaaaatgactgagaaagatgtctgttttacttactaatgttatatgtaacaataacagctaagatttattaaatacatgcttaccatgtacaagtaagtgctatacatacattatctaatttaatttatgcaacatctctatgacatagaattatcttggtcccagtcttacaagcaaggaaataggctctgagagtttgactgacttggccaagtttacagacttgcaggggccaaggttggatatggacccagaaatctgactccatacccgctaccattaactagtccttattccacattttcctttttttcctttaagctcagttgactttttaacgaatgtcttttcctcatatttagtaatttttaaattctgaaattaagataatgctttctagaaacatagtttatatggaaaaatatttgcatgaaaaaatagaccctccttcttatttgcaacctcttgaaagcaggcaccacatcttatctgcatcaacagcagctcctggcacacatggaacattcaataaatgtttgttaaatgaatgaataatgttcagagttctctattaaaaagttcttacatgatctaaatacttaaagacaggacctaaaaattaagttggctcaattcaccaaatctcaactttatagtaaagcacacagttttggtcccagaaaaacaaataaatgaaagcagaaaacaaatttcacttttaagaaatttttaattctgcccttggaaagttgaactgctctgtggatgtttcaacaaatgtggcctttaactatctggataatcttttttagattataatctatagtctgcatgacaaaaagtgatgcccaggctcactaatgtctgcatttcattattttccttttgctgtaaccagataggatttaaaaaaggagaaacagtcaagcaaggaccatggtctcaggaaaggaggagaaccacctccaggatatacagcttgctttcatcttcctcttcttcttcttcttcttcttcttcttcttcttcttttcttcctcctcctcctcctcttcgagacaggagtcacaccatgttgctcagtctgatctggaactcctgagctcaagctactgtcctgcctcagcctcctgagtatctgggactacaggtgcatgtcacagcacccggctacagccagctttccaaggtgcccatcacagctgccctctgagcaatgactcaggaagggaccagttggagggaagatgggagctcaggaaaagtgtcaggatacaccttgcaacctccttcttctaacccgtgctttcagcccttccttttgtggtttcttcccactccaaaatttcccataatatttatttgcataaattttccccaaaataggaatgactaggcatattgagaggaccacatttacctaccgcccttcccactttagtaatagcatcattgttctaccctgtgcattccagtatagcacacagacatcttaagtgcagaacttaactttattgcaacataagggaatttcggggtaaaaactgcattcgtgaaatcaatcacacatggggctcaggttactcagcctggcatggttcaaagccttatagcaattcctcgtaggcgctgcctgttgtcactcccttggctgtctgtcacccttgcctcaggctccagccttagcctcagcttcttcttcctaatgcacctgccagccccagacatgggtactttccagattctgcagaatgaggctttttcctgtctaagtctcagcacatccttatcagcatctcacacagactgcaacctctgcagtcggcttgtgtccagggtcctagtccccatcactgcttcctctttatactctccgcccaatgcctgctcctgtgcgttcccacactcctgccctctggcatgtacagtttcacatttgtaatctatgcctctacgtacttacaagaagaggaggtgaaaaactggatttggcacatattgaatttcttggaccgtgttcatttttttctgtgtctggaatccactgttttctagcaaaaactttcttaagatttcaaacaccaaccctaacactctgagtttacctgcttgaatgactgcctgtccctcgggctgaagtcacaacattcaggttattattaatgattgtcaatcaccatctttttgggtccctgttgttttgccttcatataatttaatatttctatttaaacacagaaacttgggcaactgtcagagtcactcctcagctaatgctccctggaaagggcatatgctttttgctcactcaaggcagataatactgaacaagtgcttaagaacgttcatgccataaaagactctcagaaaaggaaggagaaactgaacgataccgagtccttacacatgcaggacacggctatttcctttcagattttgtaattcctatactggtcattctagttctaagtaaagaaaccaggctttttttaaaaaaaaaaaatcacaaatctgtagagctaggatttggacccaagtcagtttgtctccaaaaattcatgcgttttctcaaaagaaagttctatataaatgctaaacagaaaacccagtcattaattacatggaggcagtttacattttcctgcaatttacacctttttttttccagactaattaaatttcctacgctggtaaagtgcttcttcccacagtttactagagtttttggtaaagagctaaaagaaggtttgctgtgaagctggcgaggaagagaagactgagattccaataaaaacttgttaactggcgtgcaacaccgtgcctattaagagtagaacaactctcctacagaacacacagccgagtctatacattgcttgttaagtactggcccaagtgctcatgtctcagacttgtcccttggacccatgcccaagccagccctgagagggttggaacaactcccccgcccctgcagaaaacacgactggttatttagaatctagggcatcacaatgaacatggctcagtattttcataaggtattactactgttgttctgaaaaagcaaggcatgcgcgcacttacttaatatgttctttgttgatttacacgtccttgatttttaaatcacttccagaaattcctagtaaatgggaaaagaatttctcaaataaatatgttatcttttcctccaacagaatgccagatcacttcttgaaagatcgtttccagattcttcttcagttcaaactgattttcacaaacttgaatctgcacgccataattaggaagctactgcaggccaatttatttggttaatttgcatcagtctaaataatttttcctgacagattacttccgttctaagtaccaagtactttttaatcctagtcaggttattgctaaggataaatgatttcacatttctcataaagatgcctgtcattaagaatattaacacaaattccttccccttgaatagaaatgagctgtcattttagcaatcttgctgtgtcagcctttctattgtcaaacacaacaaatgatgggaaaatcaatttactctttagaattagtcaagtgaggaatcctttgaagtgggggtgcagagtttcgcctgaattctataatcacgtaacagcgagtactgtatgtatgttggtaaaatgttgtgaaatttaatgaggactatttgttgccataagaccttccagacagaatctatctctgaaaaagaattccccactcctaaaatagaggtctgatgagcaacagatgtggtttaaatgaacccttgttcaactgaaccaagaatatattgtgatctgtatgaggcacaattcagaagagaggggaggtggctacagcacagcctcagtgttgagtttggttgtggggtttaaacatatttatttatttcataaagtttctctcataaggcacaatgcaaatgagcttttaattaatacaatctaatgttcagaggatggtcttcatgctgtttataaaacaatttacatttttattttgtagtctaagaacgtgtgtcgaaaagcatgtcagtgagtagccataaccttcagagtgatctatgtcctggcaatgatttgtaagttccacaactcagtttctccacccataaagagaagattagatcgttgttcaagaatgacaactatttaatatttggaaatgactaaataatgaagtgcctggattctatagaaatgccgaggagaaaagaagattaatttcaaaccaaagtctagtgcaaacatgaccttcctattgtaaatctcatgaataggagaagaaataacatctaaagctttgtttctagggctgagactctggaaatatattaattttaggttgtttctgatggcaaaaaaaaagatccgtctattacaatctcttgcctgtggagatgagaaaaaattcttcctgctacctttgactgaaataatgcagttagcaaagatttaaatgacaagagtagaagtgtcatctttttgtccctttgcctctaggcaggactacagttaagccatctcaggaaagagaagagtgctattgctcccaaaactctccaggtgagaatgataaaaattaaaaacagcaagtgagaaaactcaggggccctgaaattaataaaggtcagttccagctcacatcgtttcagttaaaatttatttctatttggaaatagcctaacagcaaaactccaacggatgggctgtttggcactagttctcggtgaaaattccatttagtattactactactgtctgatctttttctattcagcctcctcttcaccctgttggtgagggagggaggccatcctagggatctggggatggccaaatacacagcacccaacagtggacagatgacagccacagcagcttaaaagtcacataaactcacagcccagggaaggaggatcagggaaggaggataacacataccatgcagggcacacaggggttgcaccgggaacagagtggacaagcagaggctgcaggaggcagtagtaacaagagaatgcggtgccctgaggctccccggggaaggtgtaattggcttgtttgaataattgtgtgggctggtaaggaagtaaaacccataaggttgaagacctggtggagtgaggctggcccagctgacagaggaatgagccaggtgggcgtcctttcttgctggaggggacatatctatgaaagcaggggagctcacagttaggccttggggggtcctgatgaggctcaaagataataaataccaaggtaacacgtgagattttaggcgttacaagccgatccatacaaactaaaccgacttatatgagactcatgttcccttgaccatgcctgatctctctaaggtcttttccacacctattttgtctcacaggaaaagagccacttttgactagattgataaaatgggagtttaagcaatttttctagcaggaggactctcaggccaagaccatgtaattagctaaatgactcatgcagaagtatcctacactcctccctttggtttgaatgaaaagagtaggagagccctaaatcatccagacaaattacatctttaactctttacttaattttagtctgtcacaaggtaaatattgacaaactttagacttatagccagagggctaaaaaaaaaaaataagtctagcttgccactgtggctgttttctgccctccatttttctttctttctctttttttttttttttttttttttgagatggagtcttgctctgtcgcccaggctggagtgcagaggggcgatcttggctcactgcaagctccgcctcccaggttcaggccattctcctacctcagcctcccaagtagctgggactacaggtgcctgccaccatgcccagctaatttcttgtattttcagtagagacggggtttcaccatgttagccaggatggtctccatttcctgaccttgtgatcaggagcatgagccactgcgcccggcccccgccttccgtttttcaagaatactgtcgggacacacacaggtcagggaaatgtagattctctcatttcccctggtttttaacaaatgtcctttatataaaagacaaaacttgagatgttcaggctctgtctgaaactactggcctcttgcatcctttagataaaggacatttgaagttaatgctgggcctgtcatccttagttataccacgttggacaaggcattttatcttctggatcccaagttccatacttttcttttttttttttttttttgagatggggtctcactgtgttgcccaggctggaatgcagtggcacaatctgggctcactgcaacctctgcctcctgggctcaagtgatcctcccacttcagcctcccaagtagctgggactacaggtatgcgccaccacacctggctaatttttttattttttgcagagacggggtttcatcatgttgcccatgctagtctcgaacttctggctcaagcaatccacccgccttggcctccaaagcactggcattataggcatgagccaccatgcatggctatactctttaatgaggaagttaaacaagagtttaaaaatttttttttagcaacaaaaccattgtctcaaacaaagtcttaagtcactctataaaacagatggagataatatttctccatttgactccaactgagtaaagtccaagccagattgcctggcctccctcacattcgtccccttcccacacactgccaaggttcctgaagtaccccttgaaagcctaaagcttgttggaacccagtttgaaaaccaccagatgagataatatctcaggtttcttccagctttcagtagaatagaaaaatcattgactatggaatcagacctagattcaaatcctagttctgtcactttctaagctgtatgaccagactcaatttacccatctgtaaacgaaaacaaaaatagttctgctaggttaaaaagacatgtaaagcatctaggccagttcctgaaacccaggagggatttgtaaatagtagctataataaaggttatggtcctcacctgagcataacaaaatgagagatgatcctacacttgaactacaaatttgcagtaagatcgctgtcattcctgaagccgaatcctcaggaacttgaggccaaaattctttaaaacctgaattggttttaattgttccaaattagtagaggggggaaaattcttctaattcactgaacaatctgtatgcgtggagagcatgtactgcatagacacaccccaagtctcttaaatgacaccacggtcgatccaactagcacaggtggaatttgaagcatgttacttttaccaaaaaataacaggggaaatgtcattaagaacactttaatacaaagccacaagaaattcagtatctgacagctcatgttctatatttcaccccatatcataaaacaattcaccagagagcagttgttcatttgctgagctgctgttgtgatagcacatattatttcaataatggaggagttcctccataaaatcagtcccagaagccagtgatgtctgaaaaatctcacctttggagaattttcctggcattctgtaaaggaagttgcacttacaggtcctctaatgtgcagcagcaaaggaacaacagatgccaacattcttgtttgcctcatgaacttaagccctaaagtaagctgacttgagtaaagtttagaggctccccttcaagttttagaaaagctttcttgtttaacttatgcaaatttacacaccctcatgaacctattgcatatatccgacaaccgtccatattttagtaccatgtggtggctctcacctatgcccatatagctggcgacaatgcaggtaagatctggtcagctgtcagtttcattcagtgaatactcactgagcacctgctttatgcagggccctgtcctgggccaccagggagaacaacgcaaggttccaaacctatggagacagacaacgcatgcggaatgacaacagagaaacagagtcacacggagaaaagaggggaaattggggaaggcttttgtgggggaggcgggatttgaactgagccttgaaggaagtgggtgtgaggatgggggtatgagtaaagatgggaaatggagaattgaaaggccgtctttagagaatgattcacattataacgtgctggggagtaggtgaggcgggagggcgggatgggaagtgggaaattagtgtggagacagaaattgtgggctttgagtgccaggatgaggaatttctttgcgtgttgggaagcagtggcaggcgcaggacaggataataataatttaaagaaaatatgagtagcaagttgtgggagcggggagggaagcttggtgctcagaataatcagaactttctcagtggacccaggctcagtggaaagagcgctctggttccgtttattgctcccacagagaagagaggagagacccagagaggtttaaaattagaggggtcgacagggcacagggaactcctggccaaccatccttaggaaaacaagagaccaggaataaagagaaccagcagaagcacctggtctgagtctaagaaacatcagtgtttactaagcacttggtctctggaacgcctggctttccaaataccacatcttcccatccactccatcctgccacaggcagctactgtgtcgggtgctcagggagccggaaccacatgcctggaaaccctgagcccctgcccgccgccgtccaagccggccggctgcagcgcagtttgtttgccgaggtttgcatgcacatattcagttgcccttttttttcccccagtcctttcagccgtgtcccgaaattcacccttagtgtaacttctgcctctgctcctcctcttcttggaactgccttttgtttgtctggcagcgttggttctatgggggtgtgtgatgataataatacgcgggcttatataaccgtcttcatcttgcgagcacttcgcagaccgtcgctaatgaatcttggggccggtgtcgggccggggcggcttgatcggcaactaggaaaccccaggcgcagaggccaggagcgagggcagcgaggatcagaggccaggccttcccggctgccggcgctcctcggaggtcagggcagatgaggaacatgactctcccccttcggaggaggaaggaagtcccgctgccaccttatctctgctcctctgcctcctccctgttcccagagctttttctctagagaagattttgaaggcggcttttgtaagtatcgtgctctgcttttactttaaaaagaaagaagacaaactttccttcctgtccctgtccttttcgtattatttattcattattcatcatattattattcattatattctcagatgatggaaagtatgtttctggccaaagtcttccacccaaatttggtcccttgtaatgataataagaggggaaagaggtttctgttgataattaattcacttaacaaaatagtacccaggcgaggtactgaaattggccactttcacagcattctggtgatgtctggctgttgatacacaccacacacacacacacacaacactacacacacacacacacacacacacacacacacacacacacactcctttttgcccttaagaggagccctagtcacctggcttgttagacaaggagaaatgatgccactttggtcttcagtttctctgccttgggtactcacaatttcaatcagttgtaattgttgaaagtttcttttcacactacgaaataaatcccatctttcagtgcaggcttgaaacttgcactggcttgggtaaactgtacaaaacactgtagctatagtggacatgtgaatttttattaaatttttcactgcataaccgaaggttctaatattaaagaaacatggacactaactttttaagcacaggcaaaactcaaagccctgttatcaaactatgtgtcttaaagagtgctgaattaacagagtactcttctcagagattatgctcactgctttgagaaactgcttttcaacaagaggtgaatttaaaactctagaataacatgaagaaagacacaacttctgaatacttagcaactctgacttgctatttgaacaagccaaaaaacaaagggtctattttgggcaattgtacaatttgcatttataaaaccgtgattataacttggtatgctatgagatacagagatttattgttttaataagatttcaggtaagaaaactaagaactataaattggtaataatgtagaaaagcaaggcctctcacttttaatgctgtaagtgctgtgattcatttgtaaggctttatcatctttacctctagatgaatagatgtgaaaaccatgtatagtatgtatgtatatgttagtgtgtatatgtgtctttatcttaaattcttacatttgttgtatctatctagtgctcagtatgttatatgatagtacaacatccaaaatggatcaagtggagaaatttatttcacatcaactttcagattgcaatgtttattcagtatttattaacacacatgggaaatattataaaattatgtctttttttagattctctttaaatgatattttcccttagaattctctgtggctcccatgaaattctaaggtataattaaagtcaaaaataagattggattctagttgcttttacccctaaatttaaaagtgatatttcaacactaaattctatactttacctaatttgattacaaagatgaaccacataatctcagcattagcctcaaaggcaaactcaatcataatagaaggaacacaagctttgatgagatctggatttcaggcttagtttggtcaaactgaattaactgagccttgtgacacacacctgtagtcttagctactccggtgactgaggcaagaggatcgcttgagcctagaaggtggagactagagtgagttgcgtttgtgccactgcacctcagcctgggtgacaaagtgagatcctatctcaaaggaaaaaaaaaaaaaaaaagagagagactattgtagtgttccagtgagaactgctgggggcactgagcagtgtaggtggacaatagggcgcagattccagaaatatttagaaggtagaacattcttgactcagggctggatgaagggaatggaggaaaaggaaacttttataatattagttttgggcctgggctactgggtagttgtaatagaataccatagaacaagaggaggtactggtttatgaagaaaattgagttagttggagtaatatcaggttgagatatcactaagaggttagactgcaacgctgagtaaaaataaaaagcaatttttttaagcataaaattatcatctggatgtggtggcatgtgtctgtagtcccagctactcaggaggctgaagcaggaggatctcatgagcccagaggttcaaggctatggtgcactataatcaagcttgtgaatagatactgcactccagcctgagcaacatagtgagaccctggctctttaaaaaaaaaatgctagatttttgtctttgaaattttgaggagatacataaagactgagctctccctactatgttctaatgccccccaagaaatggtcactatctggactcaatgaaatcagagctttaatcttgtgtccctgctgccaaatgaatttttttctcattaacttttcaataggaagcccatgtctagggcagtcttgcctgtagctatgtgtatcctcaaagagagtaatttttacttcttcagagacttcagaaatgagcagagactaaagatctatgagctagtagaatacttattcataaaaagcacatatgcatgaagaagtaatacttatcaaaaacaaaccctttccttaacagggattcttcacttctcttgaacaaggaactcactcagagactaacacaaaggaagtaatttcttacctggtcattatttagtctacaataagttcatccttcttcagtgtgaccagtaaattcttcccatactcttgaagagagcataattggaatggagaggtgggtaacattcgcaaattttttaaagatgacaactggaagaattttaacattttgaatgaatagaaatcaatctgattagcaggcaggaagctgtgactttttaaatcttgaggtctgattacttgataaccctggttttcttataccctttcaccctttctgtgctcagcacttaatcttctaggcaaagcctctatcggatttcctggatttcagagctgttaccctacctgagcacttcagagcaaatgccatttcttataaaaggggcttagccccagactttatggctagtcttgcaaagtggtataatatttctttctggtacgtgaactgtatcaacacatttaaaaacagatttaaaaagctatttccacctctaaatataaagagccttaccacttattagaaagatagcatttgataacaatctgaatttcttccacttctgatggctcacttaattcaccaaactttggaaatcatctttgacttttgaaatggtgaaaaacatttctatttttgctaaaatgcttttgccataaaaaaagaagtgtcccaaaaaggaaccgttaacatctcagctatgcaaaataatcaccaaatatatacttttgaataagatgactgcatcatgggaaagttcattatttaaggaaggaacaagatatatttggggaaattcccattagcacaattgaagtatgaagaatatactgagcttccatatatggtgctggtcattccacatttaggttactcaagccatttaaacttggcttcataagcaagtactacaccctcacaatctttttaggttagccgacataatgatttactcccaactgggtgctgcctgagccactgtgctttgcctctgcagtgtttaaagagtggatagttcgcagctgtgaagttccccagacacctgagtccaaactgttgctggattttgcttctttctgtgctccatggaaagctggaagctcctcaactttctcttgggtttggcttcctgttcacatgttttctggccccatgtcaattgtgtatgaagtaatagtcccacatgcgtgcaccatccacgatggcaagatttgtgtggttcagcatgagttttctaatgagcacactttggaccttccaacaaccctttaggaaaagcagtttggaaccagttattactttccaaggtgacggaagctaaaacagaatgttcttttctcttttttttttttttttttttgagacagagtcttgatctgtcacctaggctggagtgccgtggtacaatctcagctcattgcaacctctgtctcctggattcaagcaattctcctgcctcagcctcctgagtagctgggattacaggcacctgccaccacgcctggctaatttttgtatttttagtagagacggggtttcaccatgttggtcaggctgatctcaaactcctgatctcatgatccacccacctcaccctcccaaagtgctgggattacaggcatgagccaccaggcccggcccagaatgttcttaagcaacaagactaaagccacttttaagagacaattaaaggacaactgcataggaaaaatgaacatttaccttacacatctgtctaaatgtgtgtatgtgtaaagtatataaaaatgcctccaattcacagtttaaaaatatcagttactgtttcagcattttgctactgatgaatggtgctagtgttttccactaaggactgttattttaatgacatttctctgcagcaaaatttgatgagtttacaaagtttcagagccaggaaatgcagcttgatttctgaacaacggggacaaccaagagagttaagttcaatcatctagttgctttatagcatggattcctaagtgctaactgcagtaacacactgacacagagagcaaagccaaaccaaactcttaaagtacagctgttaaactatcaagcttaacttctcgatatattctcaacaggtgaaattctggcacacacccacacttacttgaagatggtaatgtcaaattaatcaccatatgtccaacattttatagaattttagagtaagaagagatattggaggtcttccagttttaccttatcctttcattataggaacagaaaaactgagactcatgagtgctctctctctctgtctctctctctctccacacacacacacacacacacacacacacacacactcacaagcacacacacatcagagctgtactgagtcatgacttacagaaaacatcctaagtctgacttaagcaaaagaaagggatgcaatgatccacagctaggccactggcttcctggtcctttcaagtttgtgtggccagcttcagcactgtgggctgacaatttattattgcttgagaaaacattcagagtcttggagtctatatttttaaccaaaacttgaataaactctaaaacaaaccaaggatccatcggtgactcagatcctgactgtcctttacagtgaggctcagccaccttccaatagttactggggccacactgtgatcccataagatggagacaaagcccaagacacaaccctcactctgagggatcctgaaacctgaccagagagatgagaccatcctgcatgcaggccatagagacggtaaactaagtaccacactatgtggcacaggttttaaatgttatgagttctagtgacagggattaatgaaaatagaggctgtcagaaaatgagattttagctgatcccagaggggagattagagttttaatatgtggaggagagaaaagtggacttttccagataaagaacagaggagtgaaagcagagagaggactgtttatgggtgggaccccaaagaagctggcctgaggaaacatttctccacccacgcaatggaccatggagctccagtacagacttaaaattatttattttgagacagagtcttactttattacccaggttggagtgcagtggcacaatcttggctcactgcagccttgacttcctgggctgaagccatcctcccacctaagcctccctaggagctgggatcacaggcatgtgcaaccatgcccagctaatttttgtatttttagtagagacagggtttcacaatgttgcccaggctggtcttgaactcctgacttcaagcaatctgcccgcctcggcctcccaaactgctgggattacaggcatgagccactgcaacgggtcccagacttacattattatctattaaaatgttactgaaatatgtacccaaaaagctatgtataagttgttttatgtttgtatagctataaatacacattagcataattctatttatactattaaaatttcaaaataagtctctaaggataaacgaaacccatacaccaataatactctaattcatattaatcctctttgccagatgatgctgttttgctgaaactaaagaataaatttgttttaactaagtattcattaatgaaattggaaaaaacattttaacaaaaggaatttctattgcatattaagaattacacctgtttataaggaactgttacaagatggcacctatagagaagaaaggatccaggcaatcagtcctctggggtggagattttggagctgagaactgtgagggccaagtcatcctatcacccttctctattctgggaaacaaacaaaccttcatacaacacagcaggaagtatttgactctcacgtgcatacacatatcagcaggaacttaggctgcctctgttctttcttcaatagcccataacaattaaattattatatgattataccacacattattattatttatttttttaaagacattctagctctgtttcctagactggagagcagtggtgtgatcatagttcactgcagcctcaaacacctgggctcaagtaatcctaccgcctcagcctcccaagtagctgatattacaggtgcacaccaccacacccagctagtttttaaattttttggttgagatgagggtcccactgtgttgcccaggctggtcttgaactcctggcctcaagcaatcctcccatctcagcctcccaaagtgctgggattataggcatgagccacctcacctggcctacacattatcattttaatgatgagaaatcaaagtctacatttataaaatttaagaaaattctggtctcatttcatgaaaatgtcttttgattgcaaatatgcaaggaaggttgtatctttattactggtctaaaaaaaatcagtccaagtaataatgattgccgatgtttattgaacccttattttgtgctaggtcgtcttgcaagtttttcacatgaatgttttcatgtaatcctcacatcaaccctatggggtagataccattttaaattcccatttgtcagaggagaatactgaggcatagagaaattaagtaatgtgctcaaggccacatagccagtgaatgccatagcctggtattccggcatctcattccagactcagctgcccggtagcatattcagaacagtctcagaaaaggtattctttgacatcagactgtgccagcctaaccacagccagatacttttgacatcacattcagatgtaaactttcactgtaggagatcatgaggtgcacatacaattataagcacaaacatgtatatgtcctctcagaacatattttacaagtgggcatctgcatgatgcttctaataatttgtgatatcagcaccatggagacaggatggaaaagttcttctagaactccccaacccccaggaggagaagcacagtgaagcgagtgatctagaggcctaatgggtgaggtgggccacattgcagagggtggcataaaactagcggcggcggagtttcactgctgtttggagtggaaagaggggtgatgagagtcgtgtgggaggaaagtgaatcctgcagcaccaggccagctccaaggaggcactgctgcagcaatcttgtggtaggagtgatccatccagagcaaagcaaaggacctggggcttaacctgactcgccaaggccagctcaggataaaaagagattccaggcctatggagggaaaaaatctgcacccattacctctgagatccccccatatgtatacgaaggtacaactgtagtcaccagtggaaaagtatgaagactttaaatgaaatgctttattaaacattaatatttacatgggcatgatcaatattttttaaatgtgaaggaaattctgagttgttaaataagaggtctcatttccttattctatcttatattatgttctcttttatatcatatgcacatttacatacagtatgtatatgtcagatgttcatggcagcaagattgcttcatttgatacttaaaacattaaaatgggaatttcctcatattcaaagtgttcaaatttattttaatcacttacatttttcagctgtcaaaaatgtggaatataaacaaattttaccacttggaaatgcttactttgctagtcatcaaataatagcttgctgcaactttaaaagattccatgattcagcgcgttttcctttaaaataggtctcccaacctgaaattagacagcactcaacctttaaacttggaacactttgtaaacttttaaaaggaaactcttctttaatggttctatgaaatccagtcaaagaatgatatgaaatgaatctaatggaaagtcttttccttgttggagaagcagtcaaaatagaaacttctacaaaaggaccgaatcacccacaatgcttcaaagactcttgcgagtgattgtaagaaaatcggtctggatgaaatttagagaatattgttcctaatgatcaccccctttgaggctgtgaaagggcaacatctgaaagatgagaggaattgctgataaaacgtaactgatggcaattttgctcttttccatcgtaggtgctgacggccacccaccatcatctaaagaagataaacttggcaaatgacatgcaggttcttcaaggcagaataattgcagaaaatcttcaaaggtattcatcaaatttttatctctagcttaaaccaaggaccacctgggcactctatgtcacttgaagaggggaacatttcacggttggggaattgttaagaactggcagaaactgaaaagtcaatggtcctctaccttcccatcacattctcattcttgttgactgagagagctaaaaggggccttccacgtggtagagccatgtcacgaaatcagtcctaagaaatgtcagaagaaccatctgaaaaatgggaatctaaacaatcatatgactattgacatattatgagctgctcaggaaggaagctcaggggaattagggggcagtgtggtaggcccgccatgcacagccatccacaacatactccacagtgtcaggagtgaaagctgtacagatatctgatttattcacagctcgtcttcacagtttctttccttggccagataaacattagtgccaagagctttcatggagccagggagagttgtggcaacccatctcagcaatttcaccttggtggcaaaaacatttctagggtttgggttcatatgagggtacaacctcatgaggctttttcaaatgtcaactttgagagttgctccctttcacccctaaaaactaatgcaatgaaaatgttcagttcctctctatttcattagtcactcttcagaatcattgctatttgcttgattttttttttcttttctttttctttttttttctttttttttttttttgagaggaagtcttgctctgttacgcaggctggagtgtagtggtgtgatcttggctcactgcaacctccgcctcctgggttcaagcaattctcctgcctcagcctcccgattagctgggattacaggcgcctgccaccacgcccagctaatttttgtattttagcagagatggggtttcaccatgttggccaggctggtcttgaactcctgacctcaagtgatccacctacctcagcctcctaaatggccgggattataggcgtgagccaccacaaccagcctgcttgatttttattctaagccttccgttggcccaaggtggcttggaataagtcctgtaatcaccaaaactttcatgaacctcacctaaaaagcaacgtcttcaagtctggcccgaatttcaggtttgccttttgagggttgttttatccagcttctctttctaatacttatcgaattaaacatttttgccttcattctacaagtattacgtgaagaaagtgaatggttcaaagtgtataagacaggttagttctttgacataaagttataagcatcagcagtttttctagaattcttggagctttgtctgaagatggcatggggtattaacccccatggctgattacagcactgtatcagatgcttgtcataaaacgagctgaatccacagtaagagaagataagttgaaagttaggtctccttacttcaaagctctaacgtaagaaggaaatattctaaaacagtaacttcaaaagataaatgtttaataattcaatgaacaagttcattgaataactaataagttcaatgaacagaactggaacttctcaagagttatttatctcttgaatcaggttgtgaacaattttctttgtgaaactctagcctgatgcatcaatttttatgttggaaaaaacaaggttggccttcagtgccataccattcaaaattaaccgtagaagagactggaaaacccctgatactacaagagcacccttcatcttctgaagaggtccctgaggatctgatttctcaaagtatctttcttagtttctcttatgctatgaagaagccacttttctttctttccttttttttttcttttcaaaacgaacagagtcttcctttgttgccaggctggaatgcagtggcacgatcttagctcactgcaacctccgacccctgagttcaagcaattctcctgcctcagcctcccaagtagctggaactacagacacgtgccaccacgcctggttaatttttgtatttttagtagagacagggattcaccatgttggccaggatggtctcgatctcttgacctcgtgatctgccagcctcagcctcccaaagtgctgggattacaggcgtgagccactgcgcccatgaaaaggccacttttctacaatgccatgttgtttgttatctagctggtaatctttcatgttgcacttttctccccctaatgtgtgatttcaccactgtgttatgtcttcttcacttctcagcacatctttattatgggaaaatacaagtaagtgtctaggctgggcacagtggctcacgcctatagtcccagcactttgggaggccgaggtgggtgaatcagctgaggtcagtggatcacctgaggtcaggagttcgagaccagcctggccaatatggtgaaaccccatctctactaaaaatacaaaaaattagccgggcgtggtggtgcgcgcctgtaatcccagcttatcaagaggctaaggcaggagaattgtttgaacctgggaggcggaggttgcagtgagccaagattgtgccattgtactccagcctgggcaacagagcaagactctgtctctgaataaataaataaataaaataagtgtctaatgttggatcatttagattcacttgctcaaatttaacatacagaacatttttcttgaaaatctatggattctgtatgagacctggcttcaatctacttttttttaatcttggggctggaaaattcaaatttaatgtttggcttcagagatctctgccccttttcaaccaactccaggatttgagctgaattagataagcagacgagtcacttcccaccactacctctgtatttatatatccacaatcctccttctagtcaattttatggaaagaaatggatgtttttgggtatgtgcttggacaatcatgtttataaaatagggaccactttactggaccttagagtttcaaaatgctgccctgtgcatttttgattgcctctctgctcatatcatttgggtataaagttctttcatttaatattcagaactgcttacctgtagctcattgaacttggcatcacctctaaattacataacccaagagaaagttcaaggagatactataagcaaatctcagaagctgcccaagcatttcctgtctttcagattgccagattgtcccttgttccaaggagagataggttgtattcacatatgagaagacaccaaaaggacaattaaatttcacagcttgggggagattttgagggttctcatcaaaaatgtttacacctatggaacagattgcttttgtgtatgtgtgtgaagcctggttttcagcttaaaatacacctgccaaaatatgaatggcctttattgtaccttctggacactaatattgcactgttggacaaggtttggtgcgcacagatgggataacttagaacagcaactatgttgtttttgagaaaattaagatttttcctagccttgttaatacctatttgggatggaaaattttattataaggatggcttagctgtgcctggcactttatttttaatattattttaattattaagttaaatttagtatattaatctaaatgtaggtggtttttaaaattgcccgtagactgtaacagtaaactaaaccttttcaaggaatcaatatcagatgtggaccctaaaacttatccttgtcttgctttaagtgcatattggataccaagacaatgataatttgtcttgctgcagaatatagagacctatatttgggggtgctaaaaagtagactcttttcctttgtgattccccttacatattttgaaacatttctcattgaagaggacaatttattacacagaatatcaactcatttaaaattaggtatttgttgtaaaaaccatataacagtcgcttaagagttttttttttttaaatcacacacttaacccaaatcagttggtcttttctttataagtatatactaagtagaatcatagaaaattgcttctatttaactattgttggcctacaaaagcagtgatttcatagggtattatctaatattttataaaattggaaacatggagaatgtacaatgtttattgttttgttttcacctacctttgtgtcaaaacggttcatacaatttctgcattgtctttttagttcttttaaatttgtgcattgtgttccattacatggatgtgggacatataagttgctcatgctttttctttataagagagataacactaaacatacacacacacacacacacacacacaatcaatacctcccttcacgtagccattctgtttagttgcattttaatgatggtttttaaattgtcttctcctgcaccatcctcttatccctttgagactaatcactttcacatgtgagacttcaatgcaaatctaagtgataagcaaatgttagtatgtacaagcacacagatttgcacccatgtatgtacatagctaaatggatctgcttagaccacagtcctcaaagccagtgagcttatgtttaaagaaaatgccaaactccaattggatgagaaacattgtgcccatcaggctgtgccatcttttgcaggctcctctctcctcccatctgactgagacctgtcccagcaggtggctctgtcagtatgcttcggctgccagtaaaattgtgctttgcctgataatggtgaggaagcaaactccagagatgttgaccaacccaaggaaaactctttgctcttgccataatgatacattcaggcaggaagttaagagaaaaatagctcttcccctggcaaggaaaggagtttaattacgatgagggtggggactgggggacattcacaagtggatattaaggaaaaagaatgggatgatgtcattctttactgaggcagtcactaaaatgaaatcagctcacacaacaatggtcttgttctatgctcaaaagcgcaagttggtatgagacattactttgcggtgatgctctcaggaagggcctaaggggccgtgctcacatgaaactatttccccaaacatcttgaagacaggtcaagaagtgcagaatcattccatccagtgctgaaatggcccacactggaccatcatttgtttcagatcaccatgccacagtttaggatagaaaaagtgtctggattcttacaacaccatgaattcaaagaggcagaatatagtggttcaatctggtatcaggccagatgttttaaattggttccttttttgcaggataattttaaatggcatactgaaattaacatggaatatattcctcagtggaaggtttcaggaagtcacttcccaagaagaaatactgccttgtatcgtgctagagaatttgtagggctgattaattccacttacagaggaagcatttgatctatgttgatcttgagtccttagttccaatggcaaatattcaattttaggttccttttctcaatggtgtcctaatttgaccgcatttatctgcttagatttcacaagagtgcatcataattataaatgaagagtagactttctaagaagccattcctggaataattaggtggtggggtcaaatcctgttattaagattctgtcattattgcattaaatagggcttaaaacaaataagccattggctgaggccttttttgaggatatttttactgcaggaatatttataataggagaattgaagtactataggctttttacattggtatctgcagtttagagaatttgcaaaaaaaatattttttagtaagccactggtcttcaggtgtacgaacatattgagatatgaggtccttctctctcttgcagattacatgaaaatgtaaaaaaaaatggattacagtggaaattcatatttgttttatgattttgctctcaaattattcaagaaccttgtgtcataatctggcatgtaggggaagctgagatgtgtatgggacaaatatatttgaagactgctttggatcgtggccatcagaatgaaaagaggcacattttgaaggagtccttttttggcagacactaaagtaaacctcagggattcctgctacccttatttttaaaaagaaggtaattcagctgtggggtttttgagagaagataattattatttttttttttttgagatggagttttgctcttgttgcccaggctgaagtgcaatggcacgatgtcagctcacatcaacctccgcctcctgggttcaagcgattctcctgcctcagcctcccgaatagctgggattataggcatgcgccaccacgcccagctaattttgtatttttggtagagacggggtttctccatgtttatcaagctggtctcgaactcccaacctcaggtgatccacccaccttggccttccaaaatgctgaggttacaggcatgagccaccaggcccggccaggtaattatttaaaaataaaaagtaactaaaatatttccaaacaaattgtcagcaccatcagaagttctcaagtttccaagaaagtgcttaatattcttttctatttgtttattagtagcctttaaagaaatctaagttcattatctgcagtcagttgacactagcactgaaaatacagatggaattttaagcaaattcattatttacaaagcaaataagtgagtcctggtatctgacaatgggattcaccataaaattaattttaaaattactaggttttaaatttttacccgaaaatgatttgatgcatttttgcattaaaaactgtatttattacatgaagtataaataccccaggagattaaatccatcctgccatattcatgggagcctgatctagcccgaggtatgatgcccagcaggacacagtggccataggagaaaggttagcagccattcagagcagtcggtgctgtgctggaggcgttataggtattgtgagtatctctcttcatggtaagtagccataatataatgactcataggattcttctctccaaagaacactgtgctgagagtcaagatatcggctctggttttagtcatctaatttactctataatttcctacaaaattagaatgtacttgtcccatttccctcactaggatgtggtaaagaccaagaacataaaagcacttgtagggggagtagacatatgaagccactcaaacacaaccgattgttattgttgtaatatttaaaggataaggcattacatggtgatcattagttcccatcataactgtgctatttccatcaccttatttctctctcattatccttttagttttatgtctctgcctgccagtaaactaatcccaatgtgtattttttaatggttggcaaaaattcaaaaatgttcttgaaaagaaggaaggccatagaattgccaggattataactatgtattcagtgcattaaaaataaaaaataatataacaaaacaaaatagaatgaaaaatctttactggcttaagccttcaaaataaaagtgaaaaatatagcacatactgtattagatacttgttgttggaattcagctgagggttgacttcaaatcatctttaggattagaaaaaatttctataattaactcacctgggacatgtgctgctgcttttaatatttgttgattggctcctgttgggcactaaagtgactgaaaaattgtcatcatctggattccccaaacagcagccagagacaaaaaatgacatccctctgctcactgtccatacgtgtcatgaggctgcccttctcacagggaaatattcaattttctttttgccttttctacccccaagcactgacttatggaggaattttttcaaatgtcatatacagtatcagcttagtagtctgtaagtgctgaaatgtccctcctgggtaaaaggagaggaatgtagtttacatttctcatttgaaagtccatttaggttaaacagctttctggttgtgaaaatattaagacagagtttgtatgacatgacttgtgcatacatgtttgaacgactgttctagtgatagccaacctctaaatgtgacagacaataattctgactataaaaacattgattttttttctctgtaactcatgtagacagtaataccatgtatgcacctagttataactagctgagctattggcttttgtggatgtctgaaaatatatgcagtgatatatgtcagggtagtgcaagaaagagcccttcctaccttaggaagcctttgggaggcgttcaagagttatcacccacaaaagtgaacttgtcttctcaaaatgggaagctctttcttgtcctaatttagagagacccatgagagaagtatggtttaatggttaggaacacagatttgggagccagactgccagggtttgaatttccactctgccatttgctaactgtgacttaatttctttatgcttcagtatccttattggaaaaataggggccagtaatgccatcaacttcattatgctgttctgaagattagatgatttcaaatgtataaagggcccatacaatgcttaacaattagtaaagtgctttatgcacagtaactatttttatttatagaaattcaaaaatccagtaattcacaaagcagaaaataatgtttttgtgttgggttttttggtgggtttttttttgttttttttttttttgagacaaagtctcactctgtcacccacactgcagtgcagtcgtgtgatcttggctcactgcaacctccgcctcctgggttcaagtgattctcctgcctcagcctcccaggtagctgggattacaggtgggcaccaccatgcctggctaatttttatatttttagtagagatggggttttgccatattggccaggctggtctcgaactcctgacctcaagtgatccacccacctcagactcccaaagtgctgggattacaggcgtgaaccaccatgcccagcctgataataatgttagtccatatcatcattacacacacacacacacacacacacacacacacacacacacatattgtcaatgtatcaggtattctgtagaaacctgtctcaggactctgcacccaccctctggaaaccagtactagacaggagcaggacctatgcatgtgcctcacacataatagtaataacaataccttaatcttacatgtttaaaatgtacatttgcacacttgtgacacttattgagaaaaccaaattaagcaatgaatgggaaactactttgggaatatattatcagcatctgtacagatggaaaaccttttttaaaccagtttttaattttctaatttttgttttctctttggatttgtttaccctttggttcagatttttttctcccattcaatcatgatttgacaaatactaataaataacaactaataatcacgaaaatccgataaaaagatcctcctgatggagacttttaagattcagtgggtccagattctgagccctaactggctggatatttttactctggtctagcatctcccctagtacaacatcacagagctgcatgctgagcttcacgaaagagtaaaatagatctgcctcatcaaaacatctgttgagacttaattttttagagccatttttggttcacagtaagattgagaagaaagtacggagatttcccatatacccctgtcctcacacatgcacagcccctccattctcaacatccaccactagggtggtgcatttgttacaattgaggaacctacactgacacatcattgtcacccagagtccacaatttacattagctttcactcttagtgttgttttttctatgggtttggacaaatgtataataacatatattatcagaacattttttactggtttgcaagttatatacattcgatgacttttttacagctacaactataattagccacactatttaaatgatctaattttaaagctccaggttaaacactgcacagaatagcatcctgcccttctattttgccattattaagattccctcattgaaagatgaaaataaaattcctagagaatgatgaaaaaaagcatcacgaagagaagtttcctaagtattatggagatgtttcacacagcatagagcactaattctgcttgtgttttatatttttgaaaacaacactttatatttaaaattcaaaattcaagtcacatatcaaatgttgccataggatctcaaagtaacaaacatagtgttcggtttccctacttctctttctttgtcattaagtatgtgacagtgccaagggctggcaagtccctgctccaccaaagggagagtagaaaaagtgcctcttgagcgagtattgtagaccccatcagcccaccaacatctaccaagtgaaagttaaaggtgatcatcagcatggcctgaaatgaacaacagggccatggcttcttatatgtacagaatccagttcaaatcttttcaaagccagccaaggaccatcggtatgaggaaagaaatatggtattgtaaaaagacaatggagagactccaccacttaccagcttgtgaatctgggcaagccgcatgttcttttgggtcccagattgcctttctgtaaaatgtggataacagcatttacctcataatatcgttgtgagggactcaaagagaagctgtgtgcagaacgtcaagcctagagctggttggagagcgtataaccgagaagcattcatttttctcctcaccttgtcttagcacgagtgttctttcctccttcacctcccccctcttaacttggccctaacatatctcatcttagctaggttccccaggttccctacacaacaccccagactgctcttgcttcctcagacatacccttcatgggcagagccttgcaactgacataggccagaatacccttgtgccacacttatgaaaagctaaaatgtgataacctttgtaaaatattccttgatttccttaacttattattattaacatccagaatttatttctccctttgacctcttatggactttataccttaattatgattcatatttggtaccctactgtcatttatatatctgtgtttcacattagattctgtgtgtttttagactaggatattatctgtctatttattcttagatttagcacagtacttgcaggtagttaagtacacaataaatgttcattgttaatttaaaaaacaaagttgcaacttaaattttaaaacactgagctttgtgaactgccaaaaagaggcatccatgctttgacttgggccagtccccttgtggtaaatttttaagatcacctacataatttttcttctatttgcttatgtgtttgaatatctaaaagactcctgtggaaatagagccagaaataaatattgagaagaacctctgggctggcatctgtcttagagagtttagtgagaaatacagctacataaagagctgttgtgaaaggcaagaactccatggaataatgaatgaataatccccaaagctctttgccatacaccaatgtctcttaaaagtagcatgttacaaagtattactgtggaagaccatcaacctttggtcataggaacactacatagacaactttaagcctaatggtacaatcattcatggctaggaaataataagatataggcatcagaaaagccacatttgtgatcaggtgcctgaaatgaggtaatttaatttgaacaaagcccttgtgaatcccagggggtgaaaagggcacagccaccacctgttgtttcatcagctcaactggactgaaggacagcctgcccatgcccttggtgtggccagggtttctaattggacttccatcatttcagccacattacagaaaaggaaagaaaagattccaacagatgctaatagttgagagacaaatagtaacacacactcttaataagttttctgtgaaaaggctctaaaatgtatttttgttgttgtctaaaaagataatgaaaaggtaacagtataagggaaagtttcaggaggcctgagctttgtcccagctgcataactgactggttgtgtaaccttggtcaagtcacttaatctttctgggcctccatttctcatctgtaacatggaggtgctcactttcagcactgagattgctgactgaactctaagattatgcttttactgtattctaccccagattgtatcaccttgtattagtccattctcacattgctataaagaactacttgagactgggtaatttataaagaaaagaggtttaattgaccgacagttctgcagactgtacaggaagcatggatggggaagggctcaggaaacttacaatcatggcagaaggtgaaggggcagctgtcctacatggctggagcaggagaaagggagagagaagggggaagtgctacacacttttacacaaccagatctcatgggaactcactcatggaacagcaagggggaaattcacccccatgatttaatcacctcccaccaggttccacctccaacactcaggatcacagttcaatatgagatttgggtgggggtacagagtcaagccacatcattcttcctctggccactctcaaatctcatgtccttgtcacatttcaaaatataatcattccttcccaatagccccctaaagtgggggagtgggaggaggctgttccagcattaactaaaagtccaagtccaaagtctcatctgagacaaggcaagtcccttctgcctatgatcctgtaaaatcaaaaacaagttagttacttccaagatacagccagggtacaggtattgggtaaatgctcatgttccaaaagggagaaatcagccacaacaaaagagttacaagccccatgcaagtctgaaacccaggagtgcagtcattaaatctcaaagctccaaaataatctcctttgattttatatctcatatccaggccacactgctgcaagcagtgggctcccaaggctttgggaagttctgcctctgtggttctgcagggtacaacctcctgggctgctttcacaggctagcattgagtgcctgtggcttttgtaggtgcagagtgcatgtgttggtggatctaccattctggggtctggaggacagtagccatcttctcacagctccactaggcaatgcccctgtgggaactttgtgtggggactccaatcccacatttcccctccatacttccgtagtagaggctctccacagggctccactcctgcagcagacttctgcctggacatccaggcatgtccatttatcctctgtaatcttggtggaagctcccatacctcaacccttgtcttctgcacacctgaaggcccaacaccatgtggaagccaccaaggcttggggcttgcatcctctgaagcaatggtccaagctttatcttggcccctgttagccatggctggagttggagcagctaggatgtggggtgccatgtcccagggctgcatagaacagtggggccctgggcctggcccatgaaaccattttttcctcctaggtctccaggcctgtgattggaggggctgccacaaaggtctctgaaatgccctggaggcattttccccatcgtcttggctattaacattcagctcctccttacttattctgcagccttgaattcctccccagaaaatgggtttttcttttctaccacatggtcagactgcaaattttccaaacttttgtgctgtgcttcccttttaaatataagttctagttttgggttatttcttcgtttatgcaaatgaatatatgcttttagaagcagtcaggccatatcttgaacactttgctgcttagaaatttcttctgccagatatcctaaatcatctctctcaagttcaaagtttcacagatttctagagcaagggtgcaatgccaccagtctctttgctaaagcatagcaagagtggcctttactcaagttctgaatgagttcctcatctccattcgagaccacctcagcctggatttaactatccatatcactatcagcattttggtcacaaccattcagcaagtctccaggaagttccaaactttcactaattttcctgtcttcttctgatccctccaaaactatcttaacctctgcccattacccagttccaaagtcacttccacatgttcaggtatctttaaagccatgccccacttctctgataccaattttctttattagttcattctcacattgctataaagaactacccgagactgagtagtttttaaataaaagagatttaattggctcacaactctgcaggctgtacaggaagcatggttgggggaggcctcaggagacttacaatcatggcagaatggcagaaggtgaaggggaagctggcattgtcctacattgctgaagcaggaggaagggagagtaaagggagaagtgctacacacttaaaaaaaaaaaacagatcttgtgggaacttactcactattatgagaacaacaagagggaaatccacccccatgatcaaattaccgcctaccaggccccagctctaacattcaggatcacaattcaacataagatttgggtggggtcaaagagtcaaaccatatcatacctcttggatgagaattgcacctttcatttaagttttgtcaggaaaatgatgcaatgagaataaaaaatgaaaccataaataatttttactttatgttttcttattcaagctgaccctagatttatttctcaacaactgagatagaatctttgttgatacagatgtttctaaatagaggcaaatcctttgttacaaacaggcaatgttaaggatgataatttgtaaataaactaccagaggttctatattataatattacctagtaatattatcattgatattatatgttttacagatacattaaaaaacaaataccttaacaagcttcctaaaaacctaagcataaagtttaaagttttggtgggaaaagacatttcttgtgatagtctacaataccaaaaacatcttctcacctgtgcttatctctcctttaccctgctgtcttagtccattttctgcttccataataggataccatagattaagtaatttataaagaaaaagggtttacttgactcatgattctggaggctgggaagtccaagagcatggtgccagcatctggtgaaggtcttgtgctgcatcatcccatggcagaagggtggaagggcaagcaagtgtgcaagacatagaaagaatggggcaaaacttcttgctttaataggagcccactctcatgatagccaacacattcccacaataatggaaattatctgtccatgagggcagaactctcatgacctaatcacctcttaaaggtcccactttgtaataccatcacaatggcaactaaatttcaacgtgagttttgaatttaagccatagcacctgctttctcagcttttgtaagaagaataaagagtccttctttccttttaagctaattctgatgacatattcctgcttgaaattctaataagacataaatttaggaaccaggaagtaagggttttaggggagattaaaagacttgaggtagggaaacgatataaggttttatcatttaaaaggcaggtaaatgggtgggggcaaaatgaacattaatagcattgatggaagaggcccagtaagagttgaggttatcaggtcctggggacttcaaacagtaactatggggtgagttaattttaagatatgaatagaaaataagagaaaaagtatccagtaaaaaagaagtcaatagacagcaaagaggaaatagaaaacagtttctctatattttcatttttgttttccttgtgcatttctgcatcttcccttttcattaccacagaccacaatcatgctaacactgatgaaagaggaaggtgggaaactgataaatcctccaagtgattggcagaaggaagaaaaataataaatgcacaaataaatcaaagaaagttatatattttacatttatcataggcatatggtttgtatatttttgttatagaattaatcacattgcatttattaggctttcagttagttgaactttttggatctgtgaatttatattttttaacatatctgcaaacttttaagtcattatttcttcaaatatttttccattaccaccgccatcttctagtactcaagttacactgtatgtcagactagttgatattgaaattgttccactgagacagaattcacttttttattagcctttcatttccaatattgtacttttcagctctagaaattgtatttggttcttctgaatagtttccatttatctcttcattatgttcaccttttcgttaatatgctcgagcatatttgtaatagccacttcaatgttctcatctgccaattccatcatctctgagtctttttctcttgactaatttttctcctggttaggcatcacattttctggcattttcacatgtctagtaatacttaattggctgttggaaattgcaaatattacattgttgaatgcctagattttgttttcttattttatagaatattgggttttgttctggcaggcagttaattcacatgaggattagttgggccagaccttttaaaacttgtttttaagttgtgctaggtcagatctagaatgacctacctctcagactcattgagtcctactcttaaggcttgacctttctaaggtttctgcttatgtgtgttcacataaatgcctcatgtgtgatcaatgagttcttcccactatagttagtcagaacttgagggccgactggctgtgtgaagtgtaagttattcaaggtacagcccccagtaattgttctttggccatctttgtagtcttactctacatatctgtagcttaaatattcagcaaaggacttgaggggaccccatacagatttctggaactctttctctttatgtctctcttctctcaagctctgtcccacaaatttcacttcacttccccaaacacactctatcctcatctctgcttagattctcctctctgtgctatagtctagaaagtgtctctagtggagcatacattacttgtgtcccttctcttggggatcacagcctgttcaatgtctgagagttgcttcatatgtcatttgtccagttttctggctgtttatggcaggaggaccagtctggtaccagttatactatcataactggaaaaataagtcccaccacattcatattcaaactttgtttctgtttcttttctccccgcaaggcagtgagacccttcaaggcagtgacagggactcattcatctctgcattctcagtatctaacatatgaagcatagcatatatcaggcataataaatattattgaataaaagaataattgaccattgttaaaccaatccataatacttatggtatctatatttaagtaatttacatgaatatctaagtgcttctgtaacatgtggggtttttttaagcaactgagaataatctattaaattactgaatatatgtaagctagagatcaatgctagagtcaggttagttctatgctaaccttacataacattccttgtagctgtaagatgccagtgtccagaagcaaatatcatatgtgttcaggtatctctaggacaataatgacacgttattctagaataaaaagtagcagggctgttttcagcattcagtctatgaagttgacaaatagagtatctaccttcagagatttctgcctctatgcaagcaaaagggttaaaaactttcagactatagtttcatttatgttagtcttctaaaggactacggtggcttttaatttaaatagcaagatgcattgagttggtcttttaaaagtctatgcagctatcttctaataattaaaaagtagactcacaaaataagaattacagtcagactgctgtaaactacagaaattgggaaggaaagaagtcttgcattttcacattaaaggtttctttctgaaatcttaatacaacatctgtacaagaggtttcgtataagaaatatctgcatctggaaggatgaagtcttaaaaatctatgacgcttaaaatctgcggatatgggcacatctataattagaatacctgcacttcactgtttaaagagtccctaaaattccagttacacacacacacacacacacacacacacacacacacacacacacatcactgtgtctatttcataggtcaacacagggttcacacaatattgttattatcaatcacacagtcttttaatacataatctcatttgatccacaggattcttaaaattcccttttgttcctttttgactatatttctgtttttttttccaatgaaaagaagacttttttaggttaagaactcagctgtgaatgagatgtcaactctgttggttcattcttctagttaccttcagcaagtcaccttttcatctttgttctttgattacacaacctaccaggtagaaataataatttgatctccacatgagagttaagaactcctgaaattttaagataggataacaaaaaactggtgcatatgaagagaaatttttcaaagtaatgtttgtacttgtttaaaactaagcaaaatgacatttaaagaataatgatttaagttcatggtcccaaaacgatttaaaactaaaggttttatttcactgtgtttttttccaacatttccccctttggtttacatttgccagttaagaatttaaagtgaggctttgccaaagccttaggttccacctggtttggggttgaaaccacatgaagccactgaattttgcatagtttccatttgaaatgatttatcagcttgggttctctttcagtgagagccaggtttacatgaaacttggccaagcattagatgaacctgctctgagttttgattttatatcagaccctaaaatgaggccactcaacctaattctgtctttcaaaaagctcttcttataatgtccccagagtatacatagtagttactagagactgaggcacagcaacactttctttcagtataaaatgggggaaaatttctcggctgcttggaacctattctaatttgaaaactagacagatttaatagaggttctagtgtcaagcataacactttagggaaaaatttccttagaagtctcaacaaaagggttttcaagtaaatagctcagaaagaccaggttaattcattttttcctttattttttcctttatttatgcattcattaatttaataaatatttgttgggcacctactacatgcaatgccaagccctgttctaggcatgggatacattactgcacaaaataattagagatcccaacttttgtaggtcttccattctaatagcaggagacagacaataagactaaccacaatatacgtagtatatttgtactatgaaacaaaagtagagcaaaattagagatcagggtgggttgcagtgttaaagaggatttacaaggaaagactcattgaggtggtaagatttgaacaaagacttgaaggagtgaggaagtagcaaccagatcttgacgaagaatgttctagacagagagaacagctagagcaaaagccccaagaggaaagtgtacctatatattacaggaaccacaagggactattatgtcagaaatggaatgagcaaatgggagagtggtaggaaatgaagtcaggcaagtcacaataggctaacacattacctggaggccatgggaaggattttggctatttctccagatgaaaaggaagccacggcaggattttgtacaaaggaaacatacattccaacttacaagaatatataagttcaaaaggctctatctatcatgttgtgggtagatgatagatgggccaaggtaaaaaaaaaaaaaaaagaaacagtaagaggccattgaaaaagatgagtgctttagatttggtgatagcaatagaagtagcaaaagtagtcagatgctagctatttttttgaagatagagccaacagtattgcctaatcaactagatattaaaaagagagaaagaaaggaagacagagagagagacagggagagagagagatggatcatggacgatttttttttttttgagacagcatcttgctctgttgcccaggctggagtgcagtggaatgatctcagctcactgcaacctccacctcctgggttcaaacaattctcctgcctcagcctcctgagtagctgggactacaggtgcccaccaccacacccggctactttttgtatttttagtagagatggggtttcaccatgttgaccaggctgaactcctgacctcaagtgatccacccgcctcagcctcccaaagtgctggaattacaggcatgagccaccgtgctcagccaaagacgaattcaagatgctgtcccaagcaactgaaaggacagagctgccatcaacagagattagaaaggctgcagttgaaagagtgttggggagatagataaagagttcagtttcggaagttgagtttgagatgtctgttagaccttccagtggaaatatcattaattaggcagttagcttgatgagagcctatatttggaaataaagttttgcatttagaagtcattagcataatgtcaacaagtatgtgagtatagacagggaaaagcactaaagtctaaccgccgaaatactccagcattcaaaagtcaaagagaagaggagagaagagctccagtaaagtaggatgaagacaaatgggtggaggagttttgggtgccttggaagccgaatgaagacagtgtttcaaggaggagaatgttatcaactgcatgtggcagtatgatgaggattgaaaactgatcattggatttatccattggaggtcatcggtgacatgtataaaagcaacaatggtgaagtagagagagagaaagcctgattatttaggcaaagataaaatggaagaagaaaaaaacaagaaatatgacaactctttcagggagtttgctgcaaatggagcagagagaaggacagtagctgataagagaagcacagtaaaatatgtgtttaaataatggaagacataaccacctgtttatatggtaacacgagtgatataattttgaggagaagcatgatcatctgggtaaaaaagaagagtattgctggagctgtggttctgaatagatgagaagaggtagaatctggcccatgggtagaagaatcagcttcagacagagagaatatgcagaacctatctactccgatagaagaacatacgtgtagtggagtagatgctggcgggtgaacaagttgaggagttggggagacctgtggaagttctcctccagttgcttctatttccccagtgaagtataaaccaaggttatgagtgaaggtcagggaagagtatgaggagggatgaggtggtgtgaaacagatatttgagagaatggaagagtcgtgggattagggcaataaagtatgtttgcgaggcagtattaggacctctttgaagttcatggcactgaacataacatgagaccatttaggggattctatgttcttctccaggcacatagagttgcacaggtgcagatacggagcagccagagagctggatttaactcaagtttggggaaaccaagcaaggatggtgaagtgagagagggggaaggaggttgagaatgtttacaaaggactgatgataatgactgtcggtggaattataattcactaccctcccctgataaggaggggaattaagacatcaggggccggtgaaggagtgggaggatcaaggattgaagagccctgccttgtcaaaggattgttggggttggcatactaagagcaatgatcagagagtgggatgcatggaaccaagatgatggagcgggcagttaccagtactcataagggctagggttgattagattggccagggagtggcttggggagaggaggggtgatccagaaaggaagaggcaattgtgttcatgagctcacatccaagagctttgaaatcttcaaaaattcagacaggaagaaatgacagcgaagcaggagctgaaatcatttagaaattaggaacaacgtcctagggtcagtcaataactagggaagtagtaggctatgtaatatgataagattagagataagaaagctaagagatttgaggtggacaatagagagcatggagggagggagaaagggacagagaagaaaagcaggccggcaggctttaagaaagattttggcatgacactgattcaacggtatgttcatccattcttgccttgctataaagaaatacctgaggctgggtaagttataaagtaaagaggttcaattggcttacatttcctcaagcagtacaggaaacatggtgctggcatatacttctggtgaggcttacagtcatggcggaaagcaaagagggagcaagcagttcacatggtgagagaggaagcaagagagtgagcggtgaggtgccgtgctcttttcaatgaccaggtcttgcatgaactcaaagcaagaactcactcattcccatgaggatggcaccaagtattcatgagggatctgcccccatgatctaatcccctccaccatgccccacctccaacacagaatcacatttcaacatgagacttggagggagcaaaaatccaaactacatcaaatggatacactcacatttgcattgaatatcctagagttatgttattcaaagatagtatagttatagacaaacctgaataaatcattgcattttgtataaagttacagtttgccaaaatgagattcttcctccatcagaaagtatcaaggggccaataacatgctgcttcttttttttatagtgaaataaacaagaaaatccttagaaaggtgccaaatgatactgcagaaaaaggaatccaatttacacgtagatggtctaggcttactttatgacaataataaagcaagtattttctctaggaaagagagcttaaatctctgaagggcagtggatagctttataacgtataatactggctttattacccttttatggttttgcatcttctctttactttgacaaaagatcattcagaagtgaacttacttcaatgatacctgcacagactttatgcctacaaaagtaattcatagtatttatcctggtgacaggtcagaggagatgatcaaatttttttattttccctagttaagctatatttcattcttgatgccagagaagttttttttaatttcctgggaatcaggaatggcacttttggcaggttctgcaccaatctgagctcacagatgcccagaaattgctcaatggtactaagtctcctaagtaattccaattttgtagtgaaacaaattctattttcttttggaataaaatagagaaacagggccaggtagaatttccctggagtaagtttccttttcgtgtttatgaattatgtctttgcccatggtgagcagtggcaaggatgacagcaggtggctcattttacaaatcagtaaaccagaggaaaccttggtttgcaaggaagttgagtggggagaaagaatattcaaaaggaaaagaatattaagtagaggatttcaaggaattaagttcttgctcgttctttactacaaatagcaatataataaaaattgcaataaacctcccaggcacctaactctatgcagagtggatttcgtggacttcatctgaaatgacaaatctcaataattaattcaacaaatttcaatgcatgccttacatgtgcaggatattgtctaggcactgagactttaatggtgggatgtggcccacaggttccactctcagggagcttacattctcagatgaccacaatctgcccccgtgtgagccgaagttgtgactgcaagtgacaggcactgaaattcctggtgtgataatcggagactgcctctttagaggttgttggaggagggatgaagcgtctttagcacttggaacaaatttcttgaagctctttggtgtagtaacaccctagctctattctttggataggttttacacaaatttgagaatataatatattctctgaaaatgattagaagttaataatgaaaatgtgcaggatcctaagcagaattgtaaagtttggaaatataaattgctcataaccaaatacctggcttctgcaagaccgtgccagcttaaggacactttgtaccatagaagtatatctcaggaaccttctcactgaccagcatcttgagttcaacgaaacccctctcctatccagtcacagagctcttcttcagtttcctgtaaagataaaggacttctcccaaggccgttagctgtgtcttgatgcaaaagagaatttaaatttaaattctttttatttaaataaagatcattctattcttacattttcttttattagtcaatctgttcaaatgactgactttttattttattagtcaatttttaaaaaatcttccatttcaaaatatttgtctcctaaagcttatagaaaaaggcaggccaggcatagtagctcatgcctataatcccagcactttgggagcccaaggtaggaggattacttaagcccaagaattcgagaccagcctaggcaacatagtgagacagtatctctaccaaaaaaaaaaaaaaagaaagaaagaaagaaagaaaagaaaaattagtcaggcatagtggcatgtgcctgtagtcccagctacttgggaggctgagatgggaggatcgcttgagcccaggaggttgaggctgcaaagagctttgtttacactactgtactctggcatggaagacagagtgagaccctgtgtcaagaaagaaaggaaggaaggaaggaaggaaggaaggaaggaaggaaggaagggaggaaggaaggaaggaaagaaggaggaagggaagggaagggaagaaaggaaggaagaggctacttgagtttcactcgggttacaggattggcttcaagagaaagatagaaaaaataataatagactcttgtaagtgtctgaaagagagaattaatccaaaagtactttaaacactctagaaatgcaaataataaaatgtcggtgtgaacagttcttgtttggctttggctggtatctttttcttaagcactcccttccggtttgctgatagctctctatctgctttgcctaggatgacatccaaggcaggcagagtatacaaggactcttcaggacagataattgcatgtgcaaaagtagcttggattcagagcttcattttaacggttcgtaaccatattatcaatctgtaaaccgcatagaaacaaaagatgtcaagagaaaataacaggaaaaaaataacactagcagacagattcctccctacaaagtcttgtagtagaaaccaaaataatacaaaaacctgacaatagccatgtcattgggggcaagcggaaagacaaggtaaatgaccagtagagccagaggaaagaactagaggtcaggaagcacaaagggctctgcagagaggacgaaagacttcattccagatgctcaaagacagaggatggtggtgtcagcgggggattcctgggcagcttagggactaagcaagcacagggctttggtttacttaaaataccagttatgcgaaaaacagaattgcaggtgtctccacaggatgtatttctgcacaggttcctaagtaaatatagaggacagatagatagagtgaacaaaaaataaacaacccttatccatacagacttaaaggcttaaaaatgaatgagattttcattgtgtggtttctacccatttagtgtgggcaagtgtgtatgtgtgtgtgtgtttctttttctttagaattgcagggaaaatgcatgatgaaaaatgatgtttaaataaccaaattcctatgtgtttcactggctgagagcagagagacaaggagggaggaaatgagaaggagggaatctgtgaagagtttgactaaaaattgtcctcttccctcctccaatataatgcatcaaactaaaagaccagtttggagaggataaagtttaggttaaaaatgtgctatatgcagcccgtttctttctttcccaggaactcttttatgtccaactgcacagtctctatcttcctctaatccttttcagtctccttgccctttgcccccacaggacctttggcacattgcctcttgacctcaaaaaatgaggagttcagagtttcagggagattttgatgaaaccacctgctgttcttctctaccattttccccaccactgaattcaaatagaacggtagagggtataaatatgctaatattctgaaccacaccaaatccccaactcagcaattcctgtgagataggacagttgtagggatgggtttgagttaataattctcccaccactacccaaataggaatgggattggaagagcttgtagacagacgtggattccaatctctctcatatggaaaaagtgcaaaaatccaaattctcaaaagattagtcgacttagtattgtgctttgtagtcgagacacctcttgattttctcttacaaaacttggttttctttaattatgtactggtaaactctgaccagaaaactggaatattttgttatctaaaatttcgcttttataaatccaacttttggacatacaactcttagaagaaagggtcataccagtgtgtcctgagatagggcatcatttagcttggggaatgaaataagacaagcacagcatggcatttaagccattagtcctgatgagacatattcacagttggtcaaagcagggaagaaagcaggcaagatagctgaggaaccacagtgggtttgttgttgttgttgttgttgttgtttcaggtagtagttccctgtctgttttaggtttcaaatttaatttggaaaatgttttagttgactaaataaaagacacatgaattcacggatcatagaaaaagaaggaactatagcagagttaaaatgtttgggttgtgaaaataaattagtaatgaaaaaggaaatgcttattaggaactttctatgtaccagctcttctcctaagtgtattacatatacaaagttatttaaacctcaaaaagtctgtgaggttgatactcttactccagctttactaataaggaaactgagatccggaaagtttaacctgtgccaggtgtcacagctagcaaaggggcagagctcccgtcagaccccaaagcctgtgtttattgtaaaaccattatgctaggtgccaaaacaatgcttggatatatgaaagggaaaagaggtgatgttcttctaagaaagccattaggaaattcctttgaactatcactgatgtagctcctaaatttcagaacccctctactctctattcttatgaatcatcaacggttagcactacgttgatgctctaactacgacctctaactacgaaactgaatcgcaccttcagttgtttatgacattgctcttttttagaaacttattgtattaattatctattgttgcattttaagaaaacaaaatgtaagagacttaataataaacatcaatgctcttacacagcttctgtgaatcaggaatgtgggagcggcttggctggatggttccagtttaaaatcttttatgaggttgcagcctaagatacagagcagaccctacattgttctaagggacttactagagtaggaggatcctctcccaagatggctcactcacaaggctggcaggttggtgctggctgctaattggaggcctcaattccttgccatgtggacctctccatggggctgcttgagtgtcctcaccacatgcatggaaactgagagcaggtgatctgagagaacaaggcagaagctgcaaagtttattaggatctagcctcagaaatcacattctgtcattctgtaatcccattggttacccaggtcagccatattcagtgtgggagggagctgcacaaaggtttggataccaggaggcgagagtcactggagactgtgttggaggctgactaccacacttactgtcagtttattaatgatcctatttggtgactcggtctcatttttctgctttagggcaagaccaacagagagatgaaataaatgcagtaaatgcattcagttataattgcagtggacaatctgcccttgcatcttcccaggagagctagcgcttgaggagtctttctggactctcaactccggtcattctattgccctactgcttgcatcaaatgtaggatttgtcactaaacgtcaggctcaccaggatagtcaaacatcaggctctttgagcaaaaagaaaaagtaatgtctagggctaccctacatattcattcagttatctgaaaaatattttttagatgcctactgatggatagagccattgtctatgtggaatcttaggcataatgtaccattaggagggctcagtctgctaattgtagagattctttgctgaaatgaactttagagatagttaaatatagtcaccactccttattacaaataaaaacattgaagtcctcagaaaactaaaacttgcttttgttacttggttatgcctgttctgctttgacttctctcatcgataaaatcaccatcaaaaccactgcctaaaatgggttttagaggttctctctggatttcattgcttttcctctaccgtagtaaccagatgaactatttgaatgaattgtacctctttccagagttcagtccaagagtcataagttgtttatggacatcactctggtccttctgtcttagaaagaggaaaatctaactaaacctcaatactagcattgacctataactaagtaaccactttctatctggttagccaacatgtcaagttagacaactgtcctttccaaagggattgaagctgttggtgtcctgcacaagtggatgctgagaaggggtagaatggaatgaggtaaacaggtacttattgaggacctactgtactccagacagaatgctagcactttcacacctgggccaaccctttaatttccaaaacgatggcatgaggtgggaggcatgatgattatcccattttacaaaagagaaaactgagggtgatttgtccaagaatggttggggatcaagagacatatttgggatgtaaatccagatctgcctgagcctgtattctgacccactaagctgcccaaacaccactctgaactgacttctcagtgaacatgcctagctcatgcctgtgctctgtctcctctcattgtcccttgttgctttggaacactgaggtttaaaaactcttttagctttatgtttgcatatatgtgtatatgtgtaaatgaacagttttcaaatacattgttatctccttaataacagtatcccttttaaatttccccttccccacccatagggtggagtactatgctctgcccacaatgagctctgaagatagtttttgttcttgtgacagattttcaaccaagccaccacccacctctcctccacctcaactcactaagtgttctcttctgctggtggagaaaaaaataaatcatttcgaattttttaatatcatgttatttccctccaaacatgtatatattgtgcttctgcaaaaagtctttcttaaccagtcaatacatttgtctgctttagagttgtgatgacagtaattaatgtggaagctgaaaagtcagatttattatgactgagagaagtctctgcggataacctgtgtcttcacttaatttcaccacagaagtatttttttattctggaaatgttttttaaatgtaagcacattataatcgatgctgcttctttgtctttctctggaatttccaagacgaccttttcctctttgtttctgcttgtagtggctccacagctcagtatcaacacgggaaagagaggcggctctaagctgattacatacgcggccacccctctaagggcgaaactgcattgctgtcagtcttaggaattcacaaccttaacagcagccatggctcttcagcagaagccctgaggctcagttgccagctgatgacctttgatgggataatttctagctttgctaagactgcaagaggaacaagtgaggggttaggaagcaagagttattcatgaagccactgtgtctttattcaagaacgttgagaaacaaaccttcatggctattcttcgttaaataaagtagcatacccatttaaatttcaaaattgttcaagtcactcataaatcctcgaactttatctttttcatttaaaaatccttttttgcctgatggtcttgtaaggaaacaagtcattctatgtcttaaaatgattgtttcaagccaaaataggcacatgagaacattttaaacttcattgaacctcgaaagaattttcaatatttgaggagagaacccttcaattcttttttttttaaaggaactggacaacaatatgaatgtaatagatccattagcattgtgagaaacaggtcactaaccccccttttcattcccacaacaccaccaaatacttttctggttttaataactgttagaaaggtctgctcaaacacagaaaggagctagtgttttcacaagcctctgaaagaagaggatgcattgcaagatctttaaattcattgtacagcaagagaatgaaaaagaatgtaagaggaaagtggacaactacctgtttgacctatacatataatagatttgttactaattagaatcagtttgttttttgttgttgtttttaccatcttgaactttattaggtttatgattgtgcaatagatctctagaactcttttatcttgcaaaactggaactccacattcattgaacagcaactccgccctttccctcccatccttctctccctcctggagtccctggcaaccaccaattttactttctttcctatgaatttgactattctaggtatctcatataagtgaaatcatacagtaaaattattagaaccaatttggatacaaataagatttagatgtacaaattgactaatctggatgtactaatatcaagacaaacaaatgaaaaccaagtatggccacatgatcaagaacacttgcttggctcttattgcctctaatagttttctgtatgctcacttttgtgcaaaagctgtttaaaatccagcttaccgatacctattatcccagcaaggacagggttgtgttgggcagtggaaaatggtaaaacctaactctgaaggcccttggaccatttgttccaaaagcaaacaagttggaaagaatgtgagttttttatattttattttaagttccagggtacatgtgcaggacgtgcaggtttgttacacaggtacacatgtgccatggtggtttactgcacctatcctcaataacttaggtattaagccctgcaatgcattagctatttatcctgatgttctccctccctccgtccccctcccccagtgggccctggtgtgtgttgttccccttcctgtgtccacgtgttctcattgttcagctcccacttataagtgagaacatgtggtatttggttttctgttcctgcattagtttgctgaggataatggcttccagctccatccgtgtccctgcaaaggacgtgatctcattccgttttatggctgcatagtattccatggtgtatatgtaccatattttctttatccagtctatcattgatgggcatttgggtcgattccatgtttttgctattgtaaatagtgctgcaataaacatactcgtgtatgtatctattgtagatagaatgatttatattcctttgggtatataccccgtaatgggattgttggatcaaatggtatttctggttctagaactctgaggaatcaaaatgtggttacttttttacctccgatctgtctttattgtaatattaaaatcaaagacttgtagagaatagcctaaaatcccttaaacaaagttaaaaggcaaataatagtctagaaaaaaaatttgcaatgttcagtgctaaagtcaactatttttcctggcttaagggagttttattcttagcagttatgataatgacaaaaaacatgatatggaatgggaatgagaaggaagctgtcaatggtttgggaaaatattttgctaatgacttcattgagagtaacataatggaagttcatcctgggggctgagtactgtacattctgcattactgaaccctgaagtttgcttaccgaaaatacttgcaggaagtagctactaattaaataggcattctccaagaattggatgaaaattgaaaaattcagaaagcatttacaaataatttgtttaaatgtctttaatataatattacatctttatagtcaaatagttctttaagaaattctttcattaagatcactacattgtgcatggtggatatttttctgggtgagttagtattaactccgtctttaagagaattatttatatatcataagaaacaagaatcttatagtgcatttgaagaggccaactctgaagaattaggctacatttttagaaacatcaccaatcactgaagttttagaatatataagaacaagtattccttccaggaaggtaggaatattacatttcttctacttacatgttttattaccaattcacacttaacattggtgaagtaagcatgatctttcatgtatcacagacttcatttccttgacaaacgacttaattataatactttattccaccactttttttgagacaagatagcagtatttgaaggcaatttgagaagttggcaagcttacaaatttatgagcttatgaaatttatgtgttacattgatacaactgacgtcatacatattttataagaactgccctaaacatagacgtcatcattcataatgaattaatacttaaaggaaatttaaaaaaaaaaaattcagctaagagagtactgttttgatatgaaataatataagactttataaggattgttgtttaaaaacaagcaagttgtttttaaaattagaattttgcatgatatatcaattagaatgctttgggttgaaatagaaacttcagcctaaactgtcctaggcaagcaacaagacaatgtctgggctcacaaatgataattccagagaataaggaaagcatgctgcagttggggctgtactggagctccattaaggtcacctgttctgtttccttccctatctcgcttggctttgcctgctgtggagagctccatatttaggcatgtttaggcccttgtgtttacaatgtggctgctccagctccagcttcacatcttcacagcctgaagtcaatagacaacagagcactgacttcctccactgctcaaacaacaaaacctctgaagtgagtctcactggccctgagtgacctggcgttgggcattgatcagcctttaaaacaatcactcttgctgaagggaacagaagagaggtgcactccagacagtgtgctctatgggagagaggaggaggtgcaactattcctggaagtacaagggatagcaaagaggaaaaattatttcctcaaaacaaaatcagggacagttacaagaatagggtgcagctcctggaaaggaaaaaggcaaatagggcctctagcgttaggatgtaaggagtaaagctctaaccttttttctggattaatataaaatcttagataagatgagggtgccaactaaggagagccagtggggagcaggtattagaaaatgtatgccacctaccaaggaacaacacaaccaccctcatccaaagcaaagccataagaggccgggtgagatggttcacgcctgtaatcccagcactttgggaagccgaggcgggcagatcaccaggtcaggagtttgagaccagcctgtccaacatagtgaaatcccatctctactgaaaatacaaaaaaattagccaggcctgtaatcccagctactcaggagactgaggcaggagaattgtttgaacccaggaggcagaggttgcagtgagccgagattgtaccattgcactccagccccagcaaaaatacgagactccgactcaaaaaaaaaaagccataaaatccctgcaagcaatcaccagcacctcactctttttcatggtgaatgtcacttagatagtagaaacttcgatcaatttaatttgatcatgtactctttatagtatttacgctcaggtgttttgcgcagatcatttcactagtcttcatggtattgctggttaacaataccacccattgtctgtttggtgtcagtgaaggcttgtgtacctgcttacatgtgtaaattcacctggcagctcctaagaagggcttgtctagttcttattcaaacaatgtgtaaaggatcagaaagtaaatgttgttccctttcatcaaacatgccacagaaattaattttgtttatattttgtgtaaactccatgatcctgagtatcattagcaagttaaatcaaaaatagctgatatcttaccactactactatatatcagaagacatttgggctttctttgcagcctgttgtttgtgtttattaacatctttgattggcaagacattctgcttctaggtacatttggttggagggatggtcagagtgtaatctattagccacatttcccaggctaaagtgggctgcattttaaaataatcacttaacaaacataaaattactaaggatggagccccgaagcacagacacctaagaatattttcctttttcgaggaatccttggtatgttgattcactaatttctactcacttagagcaatgtggtagacatagctgctattttttaggccaatgtgtcgaactcacactctcataagcaagacatggagtggtaactgccaggaagtctggtgagatcatcgaaagccatgttcctgctctttatggccctcccagggaggaagggtggtgtcctgcagaaggacccaggcgcttgactgcctgagttaaatgccagtcccctacctactagttgtaaccttggaaaagctattcaacctctgtactatgatgacttcagctaaaatgggggaatgagtcctacctcctccgttttgtaggcacttaatgcatggttcctggcttatactctgtgcccagcaaacgtaagcttctatcattagcacctctgactcactgcacagcattaggagactctgtgccctggggagagagtgaaaccctccagctgggctttcagaacactctatttgtctctgctggtggaaggagattagctagcaaagggatttctgggcatccctgacagcatctggtacacagtagggcctcttagaggtttgttgaatgaatgccaggaccctggctgaaaggtgcttctcatccccaaggtatcaggcactttaagaatagtttcatacatttctttttaataacctcaaccttgtcttctatgaaatagagttcgattgccagaaactgtcattaaatatgcatgactctgttaagagattttttttgaacagcttttggtttccaagagtataccatattaaatagatataaaaattcttaattctaccctcagcatgagtgtgggcatcttaggggtaccccaagaatgtgaatcattcaaggggattcgtcctcatgactaagccatcttctgacactaaagttcaggtgtttaccatttttaccacaaagggggaaacagcctgcagaaacagttactatcctgccatatgtcaggggacactgaggctaatatctgcacgtttggaatgagagtgtgtgacatgcagtgctttgcacaatacaggatgacggcaacttttgactttcaacttctcgctttcttcactcattttcaaattcctcagagactgtcttttcagggcccttttaactgtgtgtctggaactgaaacagaagaaaaagagaaaacagaaaaataaaaatagaatagaaaattgaaaaaaaagtaattttctcaagttttataacatttcaaatcctttttttttttttttagacggagtctcgctctttcacccaggctgtcgtgcagtggcgccatctcggctcactgcaggctccgccccccggggttcacgccattcccctgcctcagcctcccgcgtagctgggactacaggcaccagccacctcgccctgctaattttttgtacttttagtagagacggggtttcaccgtgttagccaggatgtcaaatacttttatacttttttatatgtatacttttttttcaaggaaaaagcctgctttttgttttgtttgcttattggtttttacatttctgttgcctttttttttttttgagccattaagctcttgctcagacacatgcttctcatcccgtccttctatgcaatgccatgaacattaaacccttcagcagccgcgttcatttgcctgcagtcagtgactatcaatttggcttgagatttctaggttaagtgcagtaatgcactaaggccgggcccctttctggagataccagcctccaggagtctgccccaggtagtccagaagttgagttggtctgaaagcacctgtctggaaggcgagggggagtacttgctaatggtatggagaggtgcttggaaacaaagtgcagggcaaaaattagaccatgagagaaagtagaaagtcctgtcatgtcaaaccttccaacactatagtcttttttctttttgcaaagtttagcttattttcttttttctttttttttgtttttttgagacggagtctccctctgtcacccaggctgaagtgcaatggtgcaatcttggctcactacaacctcctcctcccagattcaagcaattctcctacctcagcctcccgagtagctgggattacaggtgcctgccaccatgcctggctaatttttgtatttttagtggagatggggtttcaccatgttggccaagctggtctcgaactgctgaccttgtgatctgccggcttcggcctcccaaagtgctgggattgcaggcgtaagctaccgtgcccagcctaactcattttcaaaacaaagtgatatatgccaggattgaaccctgtagctggatcccgtctagtgtccagggctgcctttgaaaggacagcagaggtccatctgccagtgaattcttcccactgctcagacactcgcctttgtcattcgacctgctgataggctgagggggctgcctctgagtggaaataccttagccattgttcttggaaagaacaacttaaaagctgagaaatggcttttagactgattgggaataaagttggacttccacaactttttacttttttttagtctaccgaataaaaatgatctttttgagaaaccagggctctgtgaaaaaggaaagtcttttaaagatgaaagatctcatgttatttgaaaaagacatttagatgtcctaatatttctcagattatactatgatgtgcaaatatgaaaagatcttgcgcttggcaattgctaactagatatgtagatatgactgcaaacaccaagggatgaggtagccagttcattttattaaatattttacatttgagttgaagaaatacccatagaagagaacattagcatctagacatccattcttctattccaaagtcaatgactaagcccctatgatgtaccaaattccaggtggcctctagagggaaaataactgtccgatatgcgcagggcattcctcgagtctcggggagggacagggaatttctacgatttctacggaagagaagtaagtgtgttcatggcagtgggagttgaagggaggcttcactgaggtctgaactttcttagggtataaaaatggtgtaaccattttggtggaagtggagttggttgggcagacagctgcaggttcatgagcccacaggtgtttttaataacagggctgttgtggggaacagggaaaagacatggttaggccagcatctaagaagattggtctggtacctgggtgaatttaagggtaatttcaggattaacagacagaaggcaaaaagaccattagaagccattacagtgatctggaaaagtaattataaaggcatgaactgtggtagtgatgaaagcaatggagaaaaggagacagaatcgagaagtattttgatgataaaatcagcaggataggggattaatcagatctcatgagtggagaaagtactgggataaatggaaagagaggatacatatggccaccagattcatctctctattcataaaacgatggttgtgccactgaatgagataaagacactaataagaccctaagtcacttttctttctaacacaatgacacggattattttctacaaatagagaacaaaatactagagtatctaatatttgtaaggcacttttgcatttataaaatgtttcactcattgtaagtcatttggtataattacaatgctgaaagacaggcagggctattatattttatggacgagaaattatgtttcacagaggacatctacttctcaaagtcacacagctagtaagtgggagagcagaaactcagattcagaactcccttccaaatccatccctccttccctgtagcaaggccagttcttttggtgaggagccatctccctgccaggacagagacaagctgtttctgccttggtgacagcgtttcctgccttcttgcccgggtttctgtaactagcactgtgcattggtgaccatggtcaggagtggatgttcttgctgtaggatcatattttagggctccacttgagatacatatgtgttataccttctttttcctcttgccacataaaatccacaaatggaaggccgatgaaaagtccctggagcaaatgtactctttgtaattttcacaagacctgtcaaattctagatgactgcaggcatttcattaaatgaagtcagtagggacttactaatgcctctgttaacttcactctaaactaacccaaattaacctggatctcaaaaatctggggtttcaataagaatttctaatcttgaaagcttatagcctttcctatatggcacagctgaaagattcctgaaaacagaaatttaggaaaagggaaagaaacaagcagaacataagtgtgggtttgggagaagcatgatggagaatggtggagcaggaaggtggtgggatttacagggaagaaaggataatgtctccaggcctatatattaatttcccactaaattcaatcagatgtcacagatggcatccacattacacagaaatatgaggttaaagcaaattgatatggaatggccctgcttgtgagaccggaggacaccccaactagtcttaacctaggcaaaggcaacatggcacttcccctgagaagtatgatggcaggtaagcctgccagtgtcgctgaaggaacatgaaagagcatctaactcccatctgtggcacagctaaaagattcagaaaaaccgaggcagtggaaatagtgaaatgcattctcacatttcatccccttgggtttaccctagcatatgatttgaggatgagggactgtaacaaatgcatcatatgtgaaagagaaggaagagaaagtagaaacgaaagacgtctgcttctaacagtgacatttttaaagcaagcacagtaatctctgaacatgtatttgaaagtacagatttcttgttcaaatagggtaccacagaaacacagaaccctaaaatgctcacaggtagaaaagctcaggaagaatgtctttgttttcaaatatttgttagggacaggaagccattaaataagatatgtgggtattgttagtgtatgacatatgggtaaataatgatgtttgttttctagagtggttactacaaaacttaacttcttaattaaaaaaaggaataaagatggaaatggtttaagctcagaactgtgaaggcaccaatttgtagatcactgaaaatatttgatcttccattctttctcaacacttcatccaagctattgatgggaaggaactggagagggagtggaagaggaatatgaggaaggtgtgtccttacttaaacttgaggcttactgacctggaattatacattttctttacagcgctgtcattcatttaaaggtctggaggataggcatgtcccctaacaccttcttcccagagagctggtgacatacagttatattccattcttcttcccataccttcctcattgacataacttctggaggtcactactgtaagaccttgagagttctgcatatgctgaagaatattggggagggcttcacagtgtttaaatatgtggttatgatggaagcagaagacatttcttcacaacatatgcaacttactcatctgagaaaattccttaacccgagacagaactggcttcagtgaaaatattcacagaacatgaaggaaactgctttgcatcaagtgcaatgtgtgtccccagtgtggtcatgatggagtgttctgtggtgtagcagaaaggtacgagatatggcttccttctccactttgagaaacagtgatttgggcttagccatttcacctctccgaatctgttttgacccccgagaaatggggataccaacagtgctgccgagagttactggaggatccaaattagaacaagtatgtgaaacctttgtacagtgtaagtttgatacaaatgatattatcaattacttgaggcctcagcatcctcaattttaaaataagttgaatacgatgacttctgaagtccattcgtgattcctgaaaacagaaatttaggaaaagggaaagaaatgagcagaatgtaagtgtgggtttgggagaagcgtgatagaaaatgacggagcaggagtgaagaggaaggtggtgaaattaacagggaagagaggataatgtctccaggtctatatattaatttcccatgaaattcaatcaaatgtcatagatggcatccacattacacagaataatgggggtaaagcaaattaatatgaaatggccccgcttgtgagaccagaggacaccccaactagtcttaacctaggcaaaaacaacatgggacttactatgacacgcatgacaaacttctatgagtctgtggttctgtgagatagagatttagcaaccatccaattaatgcttcttattgatcaaatcagactatttgtttttttaattactctaaaaacaccactgtatacattccatacttgcaaatatataaattaagcccctggttttgtttttgttgttgttgttgttgtttatttcttttaaattccagggtacacgtgcaagatatgcaggtttgttacataggtaaacctgtgccatggtggtttgctgcacctatcatccatcaccgaggcattaaacccagcatgcattggctattttccctaatgctctccccaacccccaccctcccctcacagaccttagtgtgtgctgtttccctccctgtatccatgtgttctcattgctcagctcccacttataagtgagaacatgcagtgttttgttttctgttcctgcattagtttgctgaggataatggtttccagcttcatccatgtccctgcaaaggacatgatcttgttcttttttatggctgcgtagtattccacaatgtatatgtaccacatttcctttatccagtctatcactgatgggcatttgggttgattccatgtctttagaagcccctgatttttttaatcatctgtgttcaatacctttacatcttttttttgacaaatagccacatcatttaggaatccttatagcccaattgattctctagactgtagcatcctagcatcactctgtgttggcagtgggccacaaatggatgacagatgtgtcaagatgtgaactacaggtgtaccaagatatctacctgctcagcctcaggatggctgggcagttctgggatggccagagccccttggactgtgagtggcctcatctgcttatcccagtgtgctgtatataatcaatgtcagtattttccatgacaggaaacactttgaggatcatagtctaaactaatcaagtttatcaaattatattcatttcatggtagttatgcataaatcaaattggctaaggtgtttcgatttacacattcatgtttctctttctaaactttgctagtttattaataactttagagtttagtaattactataaaatcagtttcacaagtctaagaatagtgtgttgtaatgtattaatttgagtttttggaatcctaatttgaggtataactgagacatttatacaaaacaaatgtttttttttgtttgtttttttgtttgtttttttttgagatggagtctcgttctgtcacccaggttggagtacagtgccacgatctcggctcactacaacctctacctcccgggttcaggcgattctcctacctcagcctcctgagtagctgggattacaggcatgcgccaccacagctggctaatttttgtatttttagtagagatggagtttcaccatgttggtcaggctggkctcaaactcctgatctcctgatcctcctgcctcagcctccaaaagtgctgggattataggggtgagccaccacacctggcccaacaaatcactttttaaaattcctttaaagcatagaaaccttgtttctttaaaaaatccytgctattcagtgaaggcagaattcctattttcaactgaaaataaaagtcctatttgcatgagtgagaaaggaaatggggaaaatgcctgcagatgaagacagataatcaagtttttcttatgaatagacatgtgccaacattcctgtggagttgtttttagtatcatctttgkatccaacttacaattttacatttaggtaagaaaatatagaatatttttagcaatattttctgaaaatactgaaattcttcttttggatataaaatatgaaaatccatcatttgggggttaccmcttaacctctttcaggaaaactcaggtagagtccaggtagattgcatgtgtgaagattctaggcttttcattgktgktgttttttaaagaagctaaagagcaattcatggcataataaaatatacttgaatcctaaaaaattataaaaagataaaggaattctttttttttttttttcatttctatggctcatgagagattcctaatattctttatttgacccagaaaccttaaactgcctaaaatattagttgagtttggagtataatgtctgttaagagaatttcttgttcccacttacctctatcaatttcatagcacttaccatatgttattgtttgtcctatttcaaatataaaccaaactcttctggtctgacgttaaaggccgtgttgtcctaacattttaaatctagaatggttgtagaatgagaaaaaacagtagggttagttaggagatataattgggtatttgactacacatagcaaaaaccaaaatagggccttattgactaaaggttttattctctcaagtaaggaaaattcagagtcagggcatcaagactggaacattagccactagggacctgagcttcttttctctctttactacatgatggagcattccatctgtgagaacttctcgtggtccaagatggctgcagaaacgccagtcatgacatgtgacaaatggacacccacactcttttatttcttttgtctttggttttttgggtttttttgttttgttttgttttgttttttggtttgtttgtttttgttttttctttgagacagagtttcgctcttttcgcccaggctggagtgcaatggcacaatcttggctcactgcaacctccaccttccaggttcaagcaattctcctgccgcagtccacgcccagctgatgttttcttttgttttgttttgttatgttttgtttggtctttttagtagagacagggtttcatcatgttggccaggctggtctccaactcctgacctcaggtgatccgcccacctcggcctcccaaagtgctgagattacaggcgtgagccaccatgtccagcctccacactgttttatagaactgtcccacacaatcctttcattacgtgtcactggaaagaaatcaaccttgtgggcacatagagttgctagggcaactaagaaatatcacctatagctggccactgcaaataaaattgggatcttgttctaaataaagaagacaatgaatgatgaggtaggcaattagcaatttgcatcacatcatttaggactctacaacagcaaaaaaatgaaaatgtaattgttttcaagaaatggtaacagaaatgagatgagttcacagtatggagaaaatagactgctgctatcagacaaaataaagttgtgccttatcattattgtatggaaaactattttgtcctctacatttatccccgtggtcaggcaaagctatgattcaagctgaggtgaatttccaggaatgcagcacattctgctgccctctccccgtgagtcctacctagaaaattacaagctttccagctgctgtccacaggaaagatgctaaattcccataaagcagtccttttctatttaaaattttgcgtttcatgtcaagcacaaatgcattttcagtagtataatcaatctaacttcctaatctgtttttgtaaaaagactttaaaatgttaaaatcaacgtatcttcaaggctttccttaaattattaatccttgagtgatttactctgagctattttgtagacatattgttaccaaaatcttgttcttcacatactcttttaaaacataagagtctattaagagtactctgagcaacatcataatgttgctaaaattattaggaagcagcattaacactttaactcactatattctcattactcgggaagtcattacctctttgtatttttactggttggtgggtttgtgcagaaagaataagtaaacctgaaaccaatattctagttgtgtgagttttgtgaaaagtagcaatgaaaaggtttgaaaccagtgcagacacagctttcctttgcttgtctgtacattatattagcttatatatttttgccatctatatccatgaatgatcaagttgacaattataaaacaacaagataaaaatggaaaataattgatttatcatggaaaatagctaccagccttggagtcagaagacctgagtataatttcaggttatgctttctcaagctactgtggcaggaggaggtggggtggggtgggggaggactaataacacctgctctaatttcccatgtaagttgttgtgaaaagcaaatttgatgatttataccaaaatattttcctgaactgtgatgccttgtgaacacagaaggaatcattttatccatgaaagagcaaatatcttcccctgggatttgagatataagaaaccacctaagcataggaaaaatctggttcacagttcaattattatcaatgtaaggtcaggctttcagaagataactaaatatgtgttagaggaaaatgctagttaggaaatagttgtgcactaaccaagttggaaacgtttgactttcatctaccttgactggcgaaaatggctctgtggggtttgttttcatttgaaaaacatgagcgctgcacaccactgtgttgttcagggtaatatcaactcacagagagtatcacacacaccccaggaagccctggggcctttcaaagtgtgccgtctgctctagctttagagtgaagggagttgccaacacattttgaaagtgtattgtacgtagcatagcatatgactttccattcaaaggcaggactcttttctcattatctcactagtgcctgatgaagtgccttatacaggtgctcaacaaagggttgctgaatcaaaatgtttctcgaagttagaataaatggaattgaacaaattgcaggtagtgttaatgcttagtcaaatatctggaaaaaaatctgttaaatatggaaaatggcaaagcaggagtgcttggaacttaatccagctcaatcttctctaagttcatttatctaacaccctcaaccagccagcaaaaacagggaaacacaagcaaaagcaagcagaattctaataaaccgatgatgcccccctacacaagcatttgctaccatgcccatacacaaaggacttgagagagaccctcacgtcttcattcttattttaaacatggatctaatgaggtctaacaagccacctcctggtgtctccctcatgtattattatagaagggagaaggtgggagaatactctccctagcacgttagaagacaagtgtaaacatgccaatgataactagaaatgatcactgatagcaaaggaggtaaaaacaatactatgagaagcatccataaggaatttcaaacaatgttgatctggtgtcatttatgtattgggcaaactgctttccacatcccagtatcacttagaaaaagtcaaaatcatagcctagagcactttggatgttaactttttttttttttttttgatggagtctcactctgtcgctcaagctagagtgtgcagtggcatgatctcggctcactgcatcctctgcctcctgggttcaaacaatcctcccacctcagcctcccgagtagctaggattacaggcatgcaccaccatgcctcgctgattttttttttttttttttgtatttttagtagagacagggtttcaccatgttggccaggctggtctcaaactcctgacctcaagttatccacccaccttggcctcccaaagtgctgggattacaggcatgagccaccgtgcccagacttggatgttaatattgaggacccagagccaaaacaaaacaaaacaaaacaaaacagtgacatcatctgcagtactctttaaagaccaggaaatgtataattaatgtttgaaagtgcatatgttagattttgccacaatccccaatgattgtcaccacctccccacacacatacacacacacaaaccagagaagtgaagggaaccaacatccccacccagggctcccaggagagcggaacttatacccaccccaccctgggctcgaccctatggcttgctttagccaatggcaggtcagcagatgtgccagatgccctgtgtaagcagatgttttgaacagcactcgcagtttccatcagcaatcctgctcctgccatggcaatgccatgcctcagcccaagtcctggagtgagaagagccacagcttggagcagcatggagccactgccccctccatgaaacagcaggagataacccttttttttgttgtgagctttaaagatttccttgtgcaaattccgtgtgctttaaaatattttatttttatttgcttgttttaagttggaacttttaaatagttcaagtaaggcagcatggaaattcatgtatctagagaccctcttttcccctactgtgatagataattgaggtattactgtgaatagcctcagttaaaattgcacttgagatggtgagaaaacagccacaagcagccaaatgcagtgtgttaactagattgtgcctcctgcaccccacaagccaggatgcctggcctcatctccttgaagttagggagacaagtcctgctgggggtgggttgggagggggatctcagaggatggaattttcatggactggggatattgaagatgatgtcactcattaaggtgtgggttaaggacagctttctgtttctggaaaagcaagcaccccagtactactcggagcctgagaatgactgactgcgtgactatgcacaaattatttcaccttctgccttgtcaccaaggattaattaatcattgcaagttgtctcgcgactccacaatgctaaatacaaatagaggagaccctcgaattcatggagctgtgactcgtggtcttgaatattcatttttaaccatgccagtgcactctctcacccagcaacaactctttgttttactgagttctgagggttccccttctgtttggaaggtgaaaggggggctgtacatggtgtgtggctgcaatactgatggcctgttttgttctcctggggagatactgtaaggcacagtggcagattcacctgaagctcatttttgccccccaaaatttctccccattaatttttccagtttgaaattctctaggcatacaagatcttttagagtgtaaatgcacttcaagagaaaatacaaaaacagaacacttatgaaggaagactttggtgtggtgtcatccccattctgcccttactgtgtaatcttgaacagatccctaaacttccctgaatctcagttttctcatttaaaaagaaaaaaaaatgagtgaaaatagttcctacttcattggtgtgtggctatgataaagtgaactaatgactatgaaatgtttaatattggcacatgatcaatggatattagcaaaaattcttgcttcttgattaagagttgagtgtcatccacgtcttggaaattgtgggaatttggaaactcaggagaacaaaaagaaaaaggtggaatggtgagggacttttggcagtcacggggcagaatggggctgtaggatctgaggaatgaaggaggagctggcgataaaatgagggggcgaggggaaaagggagcaaaaagagagaaggaaagaagaccagacatgaaccctttcggttgtgcccagatcccggcactagtccacgtggtgctggaagttactccctgaagtcaggcaactggaaaactagggctccaaaactgttttcccttctcaactgggtatcagaccacgtgtcccaatttggggttgctgtgataagaattgaggtagataaagtcatttggaaagttgcaaacatgaccttggcccaatttcagcccactgcacctggtccccatgattcatgccccacttttccagctcactttgtgtggccgcatccctttccctactcttccacagtgtgggatgaaggattcagctcagcattcccagaggcacctaatgtcatggtgtctttactatcatggtggtttgatacattttttggatcatattgtttaatcgattcgaagtttgtttcctactgcaactatattcacctgccactgtctcaaagaggaggctataggtgatgaaaggcccacagggggcgattggcagatacggctgaacagaattggtaaactgagtcagggctttatgaaaacaaaagccaagtaactcactctgcctccttaatctctggtgataatttaccttaagatggaaatttcagcctgggagtgttgaacctatctttaagcttagcagttgtttaatgaacataacaaactccagcattgctctggcccctgtcagagtccgttacttcacatatgtcaagaatttgagcaaccttactccttcagacatggaaagagagtacgtagaaagagatgttagctggtcatttgaaagccactcaaaagaacacttctggatacttgttgaaggaggtgaaggctctcccatggaaaactccttcagttgttgatgcctaggatagactgtatgttggcatgtttgccttcttggcaactctgggaagggtgatcgtaaacagtcctgtcagctacaaaataattggcgattattttgtagatagaaaataatcctatcttgtaaatgcttagctgcttcagcccatgcgaaggtctgaggagtcagccttcacggaagagacttgcaacacctacttgtctgggcttcacttttcctttcgttagtgctagtgggttgatcgctgtactctagaccagtactgtcagcatcagcatcacctgggaacttgctagaaatgcaattttaaggccgggtgcggtggctcatgcctgtaatcccagcactttgagaggccaaggcgggtggatcacctgaggccaggagtttgagaccagcctggccaacatgctgaaacctcgtctctcctaaaaatacaaaacttaactggacatggtggtgcacacctgtaatcccagctactcagaaggctgaggcaggagaatcacttgaacccacaaggtggaggttgcagtgagctgagatcgccgccactgcactccagcctgggcaacaagagtgaaactatgtctcaaagaaaaagcaattttataggtctcatcccagaatcaaaaatgctggagtaattaacaagacctctagatgattctgatgaacccctactccacgttatgaattaagtacttgagcctagggcctttatttaagggttgtccttctcttgcgtagctcttttaaagtgtccagtattctgaagttaggagccaagtgtggtaaagatgtttcttttgggaagaaaagcttcctcaaaatctaattgctagaaggaagtcagtaagttgtcaaggaattttaaaaaaatcagtactaagattatgactctagcctggatcttcatctttcttgcctggctttattctccaataaaactaattagcaatttaactatgcaaattttggaagatttctgatttggatttagtccaaatatgaaagtagtggtacataaggacatttttcttagtgaatttggaaagcattgatttacagtagtccagtagtcaaaatccctttgagccagatgggcattaaatatgctggcttgctatttgtgtaactacagttttacaggatttattgatccaatacttaaccaaccaatggccacattaaaaacaatcccttccaactctctcccataattaccagtaaaccaccacataggtatgttctgtaagagatgatttaggagatagatagaaacaatcttgaattatttaaatcgtttgttatgtaaaaaaatgtagaattattttgtgtggctcagaagaatacagcatgactaagcatctagaagagaggggaaggcagatttttgttcaataaaagggagaatttcctaatcttaaatctcaccctaaactaaacaggtggcctagtgagtcccttgttacctacacagggacactattcactgatgagtgagaggttttattcattaaaggttgatggaggtgaacttttaagatccctttcagactcagagattccacaaggtgttttccagaacacctccttcacattagctctccaaagtcaggcttgctaacctcctttctcatatatgatctcttccctgaagccatattccaaggagaaaaagcagaaagcagatggcctgcatgccagagcatcatttttgatgatttcacaaaaacagtttatgatcatttacatttatcctttcgtgtgtacttcaaggatatgctgtatgcaagagatcttgatatggagggccagacgcatgtcaaatccaagcctttgtgttttcaaccctgattgaaactaaatacaattatgaaacagaaacaaagatcagagagaaccagcaaattaagaaaacatctagaagtccaccaggactggaggcctcagtaaactttaggagccctggtaaactttgcaggcagccagacttagtagacttctattaatgatggcaactattaatattttgaaattgacaaatgttgttctatgacacatttcatatttcaccatagcgagccaagggaatgttaggcttcagattcacaactttataaagcattttccaaataaaccaagctcctcactattgttggaaatagttgctgtgtttggctaatccacccatcattgaaaactgttttagtttcccctcaatttttatgcaaattttatatataccctaatcaagagaacatgagtgcagtctttatttttgtttttccttaattaataaacatcatctatcttcctttctatgcaggatgttttagtaagcttgcaaatattattaaagattgcttttctttttgaagactgagatattaaaatcagcccaaccctgttgcactgtaatctctaatatcacatcaggttttaataaacctcctttttgcagcacacatgtgcttgagacttcatggaaaccaagtcagaagagagaagggattactttagatgactttaaaatatgcattgtttgaaatggcctctggtgaccagctttcatgaatggctggctttacttgtggggcccatcatccagtttaattatatcagctcctttgtgtgacaagtgctgttcttgcatatgctgagaaatgaaagtttaaaacaaagtagagtaatgagtgagaaaataaattctggaagtggaacacccctgggtgtttgtacggaagaattctaaggactggtccacctataaacatctatttatagagatactccacagtgacagtaagtgtaaatttgccttaaatgtccctggacctagatcataatatgtgccttttcaggaagatttattttacatataagtaacactttaggatgctaatgtggctcttaaaattttcattctataaattcttatgcataaaacttcataaaggttacttttttgtaacattagaataaaatgctaagtttttattagctaaagtatttcccaacttctgtccagccagtaaactaacacagatgtcataaagtttcaagacactacaggttcattatttgaatctataaatgttaggaaagttatggttttagaaatctcctgttgtatctcttgagttgttagcctttctaaaaaaaaagaaaaagaaaaaaagaaagaaagaaattggtgagtcgccgtggctcacacctgtaatcctagcactttgggaggccgaggcaggaggatcatgaggtcagtagatcgagaccatcctggctaacatggtgaaaccccgtctttactgaaaatacagaaaattagccaggcgtggtggcaggcgcctgtggtcccagctactcgggaggctgaggtaggagaatggcgcgaacctgggaggcggagcttgcggtaagccgagactgcgccactgcactccagcctgggcgacagggcgagattccatctcaaaaaaaaaaaaaaaaaaaacaaaaaaaaaaaacttcatacataaactgatctgcattttaaagtttccttgaaaatgtctccaagcaaaggcattggctttaataggatatttgatttttttaaggttctcctgtaagtaatacattttgaaaaaaaaatacagctaatctccataatttgccttgagctaggaactagaattgtcttttgaaatgtgaatgcctccttcacactgtttcccagagctttctttcctggtcctctatctgcctctgcgggaggccaagggaaggaggaaggaacttgtttccccactctgctgtgtttagccctgcaaagaagttagagagcattatattggcagtgaacttgatggcataggaagtaggccagtgggctgggcgtggtggctcacgcctgtaatcccagcactttgggaggccgggacaggcagatcacttgaggtcaggagttcgagaccagcctgccaatatggtgaaagcccgtctctactaaaaatataaaaattagccgggtgtggtggtgcatacctgtaatcccagctacttgggaggttgagaaaagagaatcacttgaacctgggaggcataagttgcagtgagccaagatcttgccactgcactccagcctaggcaacaggcaagactccatctcaaaaaaaaaaaagtatgccaatggggttctcttgactgcagcttcatttatatagtaaagtcaggtgttcctcttcctacatacgactgtgagatagtatttcgagaaatgattttcagatggtatatttatgtttcgaaaccatttctcgtagtacaagatagtgtttccagaaatgccttcaaaacataaatataccatctaattgtctttttaaaaatatttacttcaacttaaaatgtatctcaagaattgtggaactttaaaaatttttgcattgcgccagattatgtacatcaggaaaacagactaaaacgaaacatgtataaaaaatccccgaatctgtcgaaagtatatttttagtgtctaagaatgattgaactttatactgtgagaaagattatgtttcttcgttacttgagatatgtgtctgtgtgtgggtatatatatttatacacatatcttaagtatgtgtgtgggcatatgcacgtgtatgtgtgtgtgtggtatgtgcatgtagagaaagagaaagaaatggggtactagtgaaatgtaatgtttgtggcatagacattagtgctcagcaaacactttggtccactaaattttccagtgtccttgccgttgagtggggccacaagactagtctcatccaatgaaatgttagaagtgaactgggtcacttccaggttgaagccctgaaaagctcctgcacaattcttgagtttattcttcccttgcttcctggtctagttattgcagcaacaggacaacactgcccccatcagtgtgcatccatgcatggctgggcagagcagagttctctgccattctatgtgtgacttgcagtatgagtgacaaatatgcttttatcatatttggaatttctttgttattgcaacaaactacttctgctgactaatgcaatatctcaaggtacttcagtacaaataagccatagatatataaaaccaaaggcaaatttaatgaaatttaatgtaataaaccttatattttaagacctagctaagatgcccaagaccacattttagttctttttaacaatatcgctgcccttcccccaaacccactttatgttttttcatcaacttttattttaagtccaggggtacatgtgcaggatgtgtaggtttgttacacaggtaaacgtgtgtcatggtggcttgctgcacatgtcatcccattatctaggtattaagcccagcatccattagctattcttcctgatgctgtccctcccccaaccctaaagaacccccaacaggccccagcgtgtgctgttcccccacatgggtccatgtgttctcatcattcacctcccacttataagtgagaacatgtgctgtttggttttctgttcctacgttagtttgctgaggataatggcttccaagttcatccatgtccctgcaaaggacatgatcttgttcctttttatcgctgcatagtatttcatgcaaatccactttacctgaagtttccaatgcctcttcttttggaaatccagttgtctcttcgttctcattctcttggatctcactgccaccattgaaaccattgatcatttggaccacaattggtcaccaatgaccattattagtccctttagacactttgtaacatatgcttcaggaatactgagttcttctggtggttttcataatatctagatcactttgttttcctttgtcttgttaatttcatctgaaagaagctggacaaattttaatttggactttatgcattctctaaaatgcccttcggaagcttgtttttatatggttttagtacctgcttttatgaggcagagtctcaaaggcacatttctcacttcatccttctcactcttcaaccctcacttcatccttcccactcttcaactccatctattttcttcctccctgagaagacagagagaaaacctagaaaacttaagtttatttatttctatgttttgtaatgcaacagattattgaaaaaattcaatatatatatgaattaagccaaaaaataaaatctgtccctctccctcaccatacaccagggataaccagcactcaccactgtgtgaatagatgagctttgaagattccttccaatttcaagattcacagtgttgtgtggcaggaggagaggagaaaggaagatctcatcatttagccaaatatttccccacaggtgttccaggtcataggcatacacttttcagctgtcattgtttgttggaagaggatttattattggaggagaataaaagtgttactacaccaggaggggatgattgtctatcttctttgcttggagttgtagtaaattagaccaggaaacaggctttctggagattaacagtaggtgaacttgccagctgtggggttgttaaaagaagaaattagctttttcgtggattcatgtatcttataaagaagatagcacatcctgaagccttactctaaagaaaagaagtaatctctgggagactcaaaagccaaaattaaggggaaagggccatgttaactgatcctaagaaatgtatgtagacagcaatgtaggatgggaggatgagatgtgggtaccagcttcttgctggtgtaattctacttcgcttgcctctgacaataatctaagcgtgttctggctaaattcagcttcgcataactgcataatctcccctgcccctgctgtttcaactgcttatggtgtcccttttttctctggcctaactataaagtgccattgctttgtactagaaataattcttctgccccatccaagagaggtttatttctgtggcgagtgggttgttctgaccctgtcccttgcatacttcagatgcatgggcattcatttgtaaaattttgtgttatccttgggtaataaaaaacacagaattttatcactcatcaacaacttttatctgagaccaggcatttagaactgaggacagtttcaaggctttaaggaaaaaaagtaaatgagaagcttgtgactagggccagacctacagccttaaatgtgagagtctgggcttaactatagaacaaggtacactctaagccagcaattctcaaaccctttggttgtctcagtatccctttatataattaaaatttattgaagacccttgccccaacagtttttatgtggattataattattaatacttacaagtgaaaactgagaaaattttcaaatatttgattcttttgaaaataataaatctattatatgttaacctaaatgatatattttattaaaaaaaactatactttccaaacaaaaaaattgtgaataaattatgaattcattttacatttttgcaaatctctttaatgtttatctgaaaagaaggaagtcgaattcttatttctgcttctacattcagtctgttgaaatacactgttctggctgaagtacagtaataaaatccagaatcacatgaataagtagttggaaagtagaagcattttaatagctttttcagatacttatagatattttctgatactacaacaaaacttggcaagtgataattcattaaaggttagttgtattaagaaatctgaagccatatcaatgaacttttcattctgttacaatagaatccattggtcatcttgtacttcaaatgcattttttattcatgtaagattttgtagcactgtgattatttgggaaatttggttcactgaactatgcgaatattctaaatgttgactcatttcattttacaatatcaaaaaataacatttgttaacatcactaccattgtcatcagaaaaagttttacttattgggagtctgccaagtgtagtatacaagttttccagaattctaattttaacttgaaaggtagatttctatcattggtaacaaacactgtcaattgtttcccttgaaatgataggctcatttcattcattatttgagaaaatgtctgccaaatatccaagtctaaaaaattcttttaagtaaaagtagtgtttcattttttgtttgtttgtttgtttaaagccactttagcttgcagctcagccaccttcatgcttttcctcaagacagccatcatactcccccagccaccaagggactttgtgtgaacctcttatctcagaaaacacaacagtgaaaagaaaagatgtgtactcaaggtcaaggtttaataaaattagtggttttactgcttcatcttaagtgaagctgggttttttttgttgttgtttttgtttgtttgtttgtttttactatatgtgaagcttctatcattcatgctaagacaaaagcggaaagcggttctacctactattgcttttatgccatctgtagaaatgtcagcgcagtgaagaaagcaaataatgtgtcagtattcttatcaaaatagttctgacctcatgaacctctcaaaagggtcacagggtcctccaaacgtcccaaactatactttggacattgctgctgtggacaaaagcaaggtgcttttgatatattggccaccatcccctctagagacctagcaccaagctgcccagccaaagtggggattggggaagacagaggtccccttaaacctttgggagcaacagggcttcagtttagattggggtattgtggaacaaacatatgtgacctaaacttcctatccagttggctggacatcctgccagtcttttttttttttcttttacatgtgacttgaaacatttaatgccacttttatagtttggcttgacggccctaagccaccctaaacaaagtcttgtaaactttccacaccaattgaccataactacaactgctgttttcattttatggcttggagtaaaagcaacttatatcctggtcttgactggtgaagaatagaacactgttcttcaaactcactctgtatgtataagaaaaacctttctgcatttctttcattttctactctttctcaagataaattgttagtctctaaggactcttgttgtcccccacaaagtatccaattcaaacattgcatccttgtctcttctgtcaagctccgcattttgtctgtcaggacttttttcccttctttacttcttttccttctagagctggaaaccaggcagttaagaggatgacaggctttaaaaggtcatttttgaataaagaattgtctgtgtgcagtgtttctagagtggcatgttttgtgtgttttagtgaaggaaggtgagatagagagaggactcgtgctggccagactagtcaaaaaattcaattttcttgaccacttaatgtatatcgttgtaggtatgaattccctgaattgaatgttggtggtggtgggaagaagctgaccaaaagttccaaagttctagtgagacaggaggaataaacattaaagatctgttgcccagcaaggtgaccacagttaataacaatgaattaattgtatgtttcaaaaatgctaacagaatagattcttaaatgttatcactacaaaaaaaatgataagcatgtgaggagatagacatgttaattagcttgatataatcattccacaatgtacacatatatcaaaacatcaaattgaaccctgtaaatatatacaattatcatttgtcaataaaaataaaaattttaattaaaaaaataagatacactgtggcagaaaaaaatgtagatcttttctgcacctttcattcaccagaaaggaagttcatttcataggaaaaaaccactctctcttttccatattaggaaatgatttttgatgtagtttatacaaaggtatcattaaagctaatttgctttttcctaaaggaagaagtaaagtaaataagataaagaaaagaataactagcaatgttgattgggttccagcaaaggttatcagcatctgaattgtcaagaactttcagcttcttgtattgctgattatttaaactcaaatgccactgtttgtctaacgcagtgagcctgtaactgttcctacctggttgctaccatcagcaggggttcatttacagtatagtggatgcacaaaggccctcttcacaaactctcccttcacacacctctgcaggccttgagaggtgagcaaagtttttgctacttaaggaaccaacctctaagaaatttctgtatttaactatttagcctgacccatgctttgtgagaacaagccattgtttatcattttattactttagttttcctgtcccttcatgcctgtatcaggtttctcacgatttaaaacaaatgcacagaaaccaaacagtcagtgcagaataattgcaggctttcagtgttcagcatgtacagcaatcactgtggaatcaccctgcgttattaagaagaaagcaccaaatcttacattagtgacttctacagggctgcgttatcaattggagctgtcttgtttgttgcagataatgtagtcaggactgcctggctgcagacactagagttttgtttaaaaaccgatttcttcttgtctctttctctctcttgcagtataattacaggctgcagagtgaaaagcattagaactgtttacaaaacagctcataaagtttaaaataatggggatacgtgtgtgtgtttgtgtaaaacaaaataatgtgtatggtaggggtaaacaatatccagtctttcttctttcactaccccctgtcaccttccagaattaagggcatgaagttgagagatggagccctttcctcctgctatgcgatgcttacacttaattagttatgcctacttatccaatgccagtttattgttgcagatcaaaatacagattctcaggtgtatggggactgagtggctgatgaaacagactgctatctaattaattttagggcagcctaaattcccataaagatgttccctcatgacatatgagaggaagattttatttttttaatgagccctttgctatctttccaagagaaaagctttcagcaggttagtgttccaaagtgagaggggcatttttccaaccctttcaaaagcctccttctgtgcagctttgcaaagattttgcagctcgcccttctggattttatttatttattttttaatgcggaagggtagccgctgactccagcctcggggccaatcaatcattttgctttgcaggtttaagatctgtgacaaagcgaaacccctgtgctatctgtgccttaccagtctcaccaacaataagcctggtgactgacaatcgagagggggctctgtccacgtaggtgccggcacaagctgaggacatgagtgggacagaggaaccagccttgcacggaggaagcaccttttccttctggtgattgattgatgggggacagtgaggaggttttcagagactggaaaaaattgtcccagtcacttactatgaagtctttgtcagcagaaaagactctccggggtagagaatgatataatgcagatgacaaatgacaggtgtgtgtttcgttctgcttgctaggtactcagtatcacacgcaggtgagtcagcgctccccaacatgccccttgcgccatctgctccccacatgcaaacactcgttcccaacgctctgtggtttccctggcactgctggctcttcctaatcgatcgtcagctctgttggggatgtgtaaagtactgtcagagtgtgagcagggtgataccttaccacccttttatggagctgattatgaaatgaagatagcatttgaatcatttgttagcagttctgaaagttgtttccttctgttcctcccttttggagcacagaagaaaaaatatatgtaatatatacacatataatatgctgttgcaagagactacttcagatcgaaaatctgtttttaaaatcattgactgatatttcctttgtatttttttctcccccttccaggaccctatctgcagatgttctgaatacctctgagaatagagattgattattcaaccaggatacctaattcaaggtattagctctcgtcagaaagcttttacatttgagctctgtgttggaaattctattttggcaatgaattgaaataggaaaagttggaatgagaataaaggacaaaagtgaatttgcaaaataatcaagtgcttaaaaaactacccagcacttgtgagggtttgctatttctgactcatgtgcaaccctgtctctgccagcttatgtgccaatactgacttatttgtagccctttctctgcaactgtgcttggagtttggatttcattttagtctcaccgtctccgtttttctctgactgcccagaactccagaaatcaggagacggagacattttgtcagttttgcaacattggaccaaatacaatgaagtattcttgctgtgctctggttttggctgtcctgggcacagaattgctgggaagcctctgttcgactgtcagatccccgaggttcagaggacggatacagcaggaacgaaaaaacatccgacccaacattattcttgtgcttaccgatgatcaagatgtggagctgggtgagacactggactcttcacttgttagtctcttttgttcagatgatttctcgagtctcaggattatcaggagacattctgaggctttgcacttaattattgcacattaaccaacaccctagtttacgcaatgaacttgtattgaccataaggcatttggtttgtgtttcagcattacttttctgatgttatgcttttgaaatggtcggggaaggggcctgggggagtaggacaatggagaaagagggtcagcactgaagactgtagaaggaaaggattgaaagccctcagttaagacattgtaaaaatatttgggcaaagttgtttcaaagagtatgaggatgtgactgtaattttatgcaatggatatgaatatagactgatactaaaggaactttcagtggttattagtattagagtggattacttattcacagtttgttatagtaattgttaggtaattcaaagttgcagtgttctatatgtcttttggtagagaatccacttactactaccttagatatgatgcttttttatttagcttgcctaggctaagcgtagagcacccagaaagcctgccaaaatctagtgattctaacttaccttctatatcacctgactgggtttcttaccttctcaccgtcttcaatggcccagccctacggtcttgttcataagccaagggccaattcttctagtccacctagtgcaaggcagatagaaagcttgcccctagaagttgtcactaccactcctcatttcttttcctgaacccaaattccttgctctcaggcatcacccagctgtgcttagccatcacattcaacctgactggtagttgaatcttctagcagagcatgctgggcttctttaccgagctcctgaggctcaggttcttgaggataaaactcttcacgctggcacttggtctccatggaaggggactttgctttcccacttgaaaccagacggtgagatcccagtaaagttaattccttgggttcagctggaagcaaatgcgctaaaaagccagcagatgtcattattgctgacgttggtttgaggagtcaacccaacttttttttttttttaacaagggtattgattttcaggcgacaggccaaaatgaaaggtgtcacacatacatgagtgtgtatttagcacatatgatgttagtatgtatgtaagtggtggtttaaatgttttcattcacttacagagcaagtaattttagcttttttagagccttgtgggtccatttcaagttagtttagtgcctaatgtgttaatagcacagtctctgcatgaggattgcaatgttaaacatatccttgccctctgcttgacctcacacctgaactcaccttccttaatatctcacccatccatcgcttttgctacagctgagatctctggatcctctcatctttcccagtttttccctcaccggtttgtcacctggcctgcctgcctcctctagtcttggcctctcttgcccacccttcactcaattgccagagttatctttcaagtatctctctgatcagatcacttttctgcttaagtcccttctgtggtttccctttgccatgagattatgcccttctcctctgtgggcaaatgagttctgagccttgcggcccctgcctgtccccaaggctgtttccctttcctccactttcactctgtgcttcataaacacaattgccatctccccaaaggtgtctggtggcttcacccccctcgcctctatccatgcctttgcacatctcatcccctctgccttttcctctttccccacctggagaaaccctacctgttcttcataacccagttcatgtcatgcgcttggtgttcccaaaacaaaaccaccctcccctccagcagcattgatggaactttcctttgcaccccgagaacacgactccagcatggtgctcattccaccatagccttccatgcctgtcccttccacttgaccaagatcaaccagagagcaagggtgtgttttatgttgcactcctcatgcactcctagtgcctgggaatatagtgggcactaaactaacttgaaatggacccataaggctctaaacaagctaaaattcccagaaataaatataagtattcatcatcatctacctcttcaatatacagcactgtctttaaaatatattaagaaattgctcataactttcttttttaacagaattcaaattttcagccttgtcctatagttcatttattcatccagtaaatattttctgagcagttaccaagtattgccttctgttggaggcatgtgactatcatggtgaagggttatagaccaggctcagccaacccagatatttcctacatatttgcctttaactccttccttgattttctagccagataacatgctaagaactagctcattggctgggtgtggtcattctcgcctataatcccagcacttcgggaggctgaggcaggcggatcacctgaggtcaggagttcaagaccagcctggccaacatagtgaaaccccgtctgtactaacagtacaaaaattagccaggcatggtggcaggcacctgtaatcccagctactctggaggctgaggcaggagaattgcttgacccgtgaggcagaggttgcagtgagccgagatcacaccattgcactccagcctgggctacagagcgagactccatttcaaaacaaaaaaagaactagcttgtttaactctcacagtaactctaggaagtagttactattctctctttaatttaggtatgagaaaaatgaggctcagagaagtcatgtagcttgtggtgagcaagtaaattgtgaaacccagacctgtattagatctgagtctccacagctacgtatttaaccactgtcccttccattaatcagccatctacaaataattattaagcacctcctaaaaacaatcggcaaattcataatattttaggttctgggagagagggaacagaagcaaaagataggccactggcaaaaacaaaatgactaggaaccacagtgaactgtgggttggaggtccagaaaagacctcctttcttggcagaaaagtcatgctctcggtagtggttcccgcttgatggagacttttcctcatttttctgtaatgtgctcataatccttctagaacattattgctctagattttgggtgttggttgttttgtttttgtttttttaccatcttaaccatttttaagtgtacaattcagtactgttaagtacatttacattggtgtgtaacccatctccagaactctttccatcttacaaaagtaaaaccctatacccattaaacagcaactcccgtttctctctccctcaatcctggcaactatcattctactttctgtctctgtggatttgactactctaggtatcttatatgggtgaaatcatacagcatttatctttttatgactggcttattttacttaccctcatgtcctcaaggctcatccatgttgtaacatgtgtcagagtgtccttcctttttaatgctgaataacttttcattgcatatatgtaccacatttttttaacccattcatccactgttggaaatttgagttgcttcctccttttccctattgtggataatgctgctgtgaacatgggtgtacaaagagctcttcgagaccttgcttttagttattttggagctatacccagaagtggaattgctggatcatatgatactcttatttttattattttgaggaaccaccttactgttctccatagcaactcaccttgttacgttccctccaactgagcacaagtgtcataatttttccacatccatgcccacacttgttattttctggttttgtttttaatagtagccatcctaatgggcatgaagtgttatctcattgtcactttgatatggttaggttttgttttgttttttactccagtgcaattttctttgccaagtgctttaataaatcttcacctaatgcaaacctttttgcacctgtaatgctgtaggcaattttggctactgtgcctccaaaaagaaagtaacagacttagtaaagacttagaagaacaattatgaaaattctaatagaatacttttctcactgggaaagcataaaacaatcctatctgtttatctagaaagatgaaggctgagaagggctataatcaaagtttataaaatcgagccagggaggaaagtactagttcattatgagcaggagcccttcccttcactttcaggacaaataaactattactctgtaaagggagtaagacacataaggaattcattaataaaagtactagaaccttgcatatggataacactttatcttttcccaaagaacattttgttcacattattgtgaatgaatattgccatctcacatgagttgggtgggtaggacaaagatcatcatcccaggaggaaacagcctgtggaaagatgaaatggcttaaccatggtccccttacttctgaatttgcttttcccacaacttaagaagttgttcacgttgtgcctatacccgtaagtacttcagagttttaggctagaataatgggtggaagatttacaattttttaagctaagtaaacacgcaaggaagtgatcaacataaagttcaggataatggctaccactggggaaaaagtgatgaccgagagcatcagtacattcacattctatttcaaaactgaaaaaatatatatctgaaagaatataatcatgttaagttttgttaaagctaggagatgcgttatttattctgttacaccctacacttgaaatattttataaatcagaaggaagaaaataaaaaatgtttgagggactcctaactttctgagcctagcatcaaagaaattgggctctaaatctttcccaaatggcctttggtgctagtctgagaaacaaaatactgagcagattagaccattgatctgactcaacatggcatttcttacattcctaggaaattgacctgacaggaacatctcagtaacattgacccgatgtttctcttagatcatatgtatagggaagctatgagtacatggagatattttgtttctttaaaacaaaagccagaacacaagatattcagaccagagctagcccacagatgtatgttgtttgatgagcatacttttcagaattaagccaatattttaaaatcatattttaaaatatatataacatataaaaaaatcagattctgacgtttcttgaaaattcaaaaaatgaaggcttgtattcccatgaagcagtcatcacttggatgtttgaaggggagctgcagctgctctcggacactgggatcccccactactgtgttgtccctcaataacttatgccaaggtgcaggtgccatttatcattgaccatactgctgtttttcttatagtcaggaaaagctctataaaccatgtctctatcaaaggtaaaacaacaaaaagacacaaaaaccctctgacttttcttatacctggctgccttcacttgcctaccttatctatgtagccctgtaggcatgttaacttccattcctgtaagtagcttttaatggccttgtgctcttttggaggggccaggaggaaatgatgagtcttagtgatctggaaacattccagactaatttattatcttctcttttttcccttcttctcccaactaccttttccccctttggttttaggtaaaaaacatcttttttttttcttgccaattccatagtttgggtagaaaaaaaaataccatttaattttgttattttttatatgcttatgcttttagaattagaatattcaatagatcatacaggcattttaataaaggaaatgtcactgtttcatgtttcatactttactatgaaaataactgttggcatgtgaaaatggcagggaagtacctaatacaaacgacttaaatatttaaagcattagccttacttcatcataaaagaatgacatcgacaaacacccctccacaatcagtaagagctgggtttgcttgttgttgtcaatcttcaaaccatgaatgctctaatccacatggaagtatctctctaggaagccaggtgtatatgaatcccacatgtctgggatttccataagtgataatgacaatatttactgttgaatttctggttctgcgagtttttctggacatgacaaacaggtttgatgaaatttttaatgtttagtaatacaaaatactgtatactcaaatgctaagatatatgtatcgggaaaggtaaagctttgttttgaagtttaaacatgtcaatgaagtaattcaggatctccgtgtgattttagcaaagtcatccaaattagggggacattttctccgatcctttttcatacaaatgatttttgtatgaaatcattctgtatgaaatgattttgggaatcaagtagttggagtatataaagtgatttaaattcctcactatggttctgtctagccacaacctatcacatactccatccaaagcactattcctggagctttgatttttaactgtgccaaaattgccaacatggtggatcttgatggattcctgaagggtggcacttctcccactcccagccaccgctgacctcttcagcatcctggtccacagccgatggctgtcacagcatccgcctgcaggagcaatggaagatgttctcagtcccagcctggaactggggcactgggacagtgtgtcttggcagtcctgtggcctggaccttccctctcatcaagccagcccagtcagcagtgcatgcacaccagctacacagacataatcacggttgcttcagagcatttgtgtctggctcccacttcatgggacaacttaaaataacaatgaagttgggctttttgcttagggtgaggagtcagtgtgtgtagaaaagggaagaattgatatttgtatttgaaaaccaatatcaacattttaagtcttacagcatagaaaaggtagttgacctctgttctctcctccagcttttggacttcagatgtagattacagagaagaagatggaagaggcaggagaaaatttaatgtgatggggttgaggtgagcacatagggcaaccacagccacctcggcacactccttacaggaagtacttgatggcatcctgccgtttgctcagcaacaaccttgtaaactagtcggagtggggagcgctattagaagctccattttacagatgagaaacacaaaccaaaaaaggataaatgacttgctcaggctaagctgtggcaaaatccaaatgttttcccacatgttcaagtctagggctctttcccttctcatctttatcatcctcacccctgccttgtgaatctgattatgagtgttcagctttacaattcatatcattcctatgaaataattgttgtaataactgagaatcagcaccgtttgcatttcaggcacccaaggcctgaaacctacagaagtgaagagcttcagcttaaaacaaaactgagcccttccacttatcggacagacattgtcctgtccactgctctcaacagctgtgaataaataactatgagttttattacagaatcatttttagtaaggtttgccaataaaaaaatcaatggcacaatcacagtgggaatatatacagggtaaggcagtgttattgactgacattaatcattgcacagccattaaaaggtgctcgatgctttccttactggtacacactaacacagtggagtgaagagattcagattcctgcacaccgtcatctgtctctacccagagaatccatagagatcagaggcaacaattaacgccaccatggcagtcagcagctaaagacagacagatccacagcccactcatgcctcatctgtgcctgagccactgagaccatttcagccttgaggggagggtaggagacaggtgttaatgtcagtcagtatctcctctaagaggcgagaagaatcaaaagatgagagtgcagaaagagagacctatcgcgactgcaagcagacgtcaattctgtttctcatcttgaaaatgtcaatgtcacagccagcattcagcctagatagagctcaagagcatggtctctgggaagactgcctgcatttacttctgggttctgctactgagggtctgtgtggccctaggcacagcatgatttagccttctgcacctccatttcattatctgtgatataggaataatagctactagcacccaccacaaaggattattgtctggatcaaattaattgctcatgtgaagcacttagaagagaacctggctgagagtaagtagaaaatcgatgtttctttttcctgtctacaatataccttatagtcttggcagtgatctaagccacctagatcactcaaaattaggcacccactacagtctcttccagctctaggcttccctgattctgtgtccaacctagaatactttttcaggtgagattcactgagaggcagcttcggcttcacccaggtttcattagaaacacaaattctcaggccccatcctggacttactaagccagtatcttggggtgggtacaggattctagggcttattatgcccttcaggtgattttttaaagttggacaagcattgtctcagaatctctttactgagaaccttcaagccagattcccactttttgttttgtttttatgagacagagtctcgctttgtcccccaggctgaagtgcagtggcgcgatcttggctcactgcaacctctgcctcctgggttcaagcaattctcctgcctcagcctcccaagtagctgggtctacaggcgcatgccatcatgctggctaagttttgtattttcagtagggacagggttttaccatgtcggccagactggtcttgaattccccgcctcaggtgatttgcccaccttggcctcccaaagtgccgggattacaggcatgagccactgagcccggcccgagattcgcattttcaaggaccccagtggtggagctgtattcttaacagtgcctatggggatccactgttgtcttggttccttttgacgtgtggactggtgggagccagggcatctggagggattgcttgggagccctacacaatcagctcagttagttaagaaaaggatgatactgagaatgagaggagaatcctagctggggcacttccagcagtgatgaattgggataagttttagcccctgtttttatattattttgactttaaatcagatttctacctcggtcccatatttgtagtctaaatgagtctgtaaactagagattacagtgctgcgattcagaaccttggatgatggcctcagctgcatttttcttttatttgaattctgctaaggctcataaaggaaactgggagcttgttctttgaaatagactactggacactgaaaagccatcaacagggtttgctgttttccccaaaatcaagatactcagtaactaactactgcagagatctaaagaggagcaatgagacatggtagaaatcttcagtgtcacctttcaccctctttccacttctacatctccgttcatccacttatctccaggatattccccctgtgtgatcaaccaacacaaatataaaatgcaacatttctaaaatggggttttaaaatctcccataaggcatattcctttttagttacttcttcaccatcagtgaaacgattggtttccagttttcttctcacggtgaaaacttcaaggtgttagccaactcccagccttctcatgcatcaccacatcacttgggtctgcttcttagggtcgctctgtgtcagaggcatagtcgtccgagttcttctttcctcaggggtagacggcttcagcgacctcatctgcacccttcgtggaccagcagcagtgtgccctcctcaatccacacaccaccattgcaactgcaacgcctctcgaggggattgcaatccactgcagcagcaacaccttacaaagacttttttcttaacatgccgttcgtgtctttgacacagaacataactctacctttgttttttttattctatcacatccagtatctctgcccagccttcaagctatttgctaaatctgctttccacatttcatgaagagaattctccatatttctcttcatgccaggaaatcaatgtgttgttctcatcactctacttgtttcttcccacctccagagcatcacacatgtcactcgctgcaatcccccaatgatatacttcacccatccgacatttacttcctcctttttttccatctgtcctcatctctcatttcagaactcttattaagccatcaatccaagttccctctatttttatatgccctgctactgctgtattcacattgttacgtgtgcattgctttgcaaatatccccaagtgatttttctatgtaggttctcctctagagaatttattactgaagaccagaggcagaaaatttcccatttcttttgtttatgctacacttgggagatcagcccggaatgctgaggttgatagaatgttttgcatgaagtaggcactcaagacatgttattcattgactacaaaaggttgcttgatgccctgaagacaaccagaagagaaagagcagttaggattgctcctagccgaggcatattttagggagctctaatgagacccaattagaaaccctcctcctgttctcatatgcgtcatgtgaacggtaaaagctagtatatgaagacacggggctaactgtggctttttggactgttgcatgcttctcttctgccctgaatgcttgcctggtttgcattacgatttccttccttgctggaaaacatagactttcttcctttctttggaagaagtgggacctgttggaaatctgaggctccaagattcaaatgcaatgggcttggctgtagtgctctgtagtacacttcttgacaagtcctgaaaagactattgaattctggcctgtgcttttctgcagtgtttggatgtgtttcagctgcagtgtttggctggacagagtaatcgaaatagtttttttttttttttccttcctcagcaatcttacgttaccagttgatccttaaagttaaaatggaatattttacaaccctgcaaatactttcgagtgcaatcgaattatagctctttcacaagcaaacagcctatctttaaaaaattgtgcataaataggtcaaaatataaattgatgttgttatcctaatagaaaaactggcaaacatttggtgagcttgctagaggataccaacttgcattgaagatcttttttaattattattaaacaaacacaggcattttgatgggacttaatatggaagaaatttttttctcttttctttcatacgattaaaatgctatagtagtaatctacactagtaatctagtagcaatgtcactagtagattgcatttgtgctgggctgggggttttgatgctctgtgtatcaggctattgttctctggtaatcttcaaagggctgctggcctttgaatctgctccatatctaaaattctagctttaattatcagattagcctgcatttttttttcttcgtgattacagggaggagaagtgtatgtttattattctgcaaaatacttgagatggtaggatctcaaatgcttaattttgttgtagaaatgagagctgatcaaattatagactcctttaagctaaggaaaggaaatgaataagtcagggaaacagaggcactgaggggcacaatcgaaataggcattcatgtgctgcactttgctaaacaatgctggcactgtgcctttcagggtccctgcaagtcatgaacaaaacgagaaagattatggaacatgggggggccaccttcatcaatgcctttgtgactacacccatgtgctgcccgtcacggtcctccatgctcaccgggaagtatgtgcacaatcacaatgtctacaccaacaacgagaactgctcttccccctcgtggcaggccatgcatgagcctcggacttttgctgtatatcttaacaacactggctacagaacaggtaagggatgacgtttctagcccatgaacgtcttgtaatatgtcttagactcaggaagaagtgtcatgtaatgaaatgcatgaagttccaacaaatacctaaaaaaggatcaagtgtttttaaactgcttgacatctaccccagggtctgggacacagtaaatgatcaaaattatttattatttattaattaatgaaaaactgatgggtaaatcaatcatgtgtaccttgttgattcatgtatttgttcattcataattaataggatttggaaagtttctttagcttgtggttgtttttaggtctcaaatgttcacttctaccttccaggaaaggaagtcatcctaattgctacacctcctattattgtttaacctacacagggcaagaagaggtttttgattaattggttttttgaaaattggggacttctttcaagaggggtagtgaacatcatgccagtctttctgagaaaaaagcaaggttccttctggtaatattagccccaaggccctatcctcccagcatgtagatgatgtccttgggttttttgtagcatttcttcataaaagggcacaacgttgttcgtagaagggctacagtgcagacatgggttgttgcttgtttttatttttccagaatcacctaggcttattcataagaatcaaatatgttatgattaaagcttgttcaaatgactttcaggcctacaatttctctattttgaagatttaaaagtaaaggagttcagataaatattctcctgcatctcttttaaaagtgaaattaatctttcccactggactcaggaaatatatggccatttgcttctttgcagagcgccctacgggcacttaatacttgttatttatggatgaaaatattgattgtgcatatgatagcactgtcactcgcagacagctcaaagtctcgactcgaagcagctcctcccgtgcatctcaagggtgttttcttatgcgtaggaaagaaactaggttacgtagaggttacagagagtgccttatctgagtgtgttttctcacattagtgatttaaatttatagcacctttcatttgaggactctaaagcaatttgcaaatccaccaaacatccctgtagagttcatagatggcaaatgtacttggctctgttttataactgaggtggggatttcaaatattgcgtgaccagctcagaaacagaatcagaggcggttccctaataaccggttcctgattttaaccatcaaattgtgttttgcttctgggaagtgttgtgtgaaatcagtgcctttcacctcccaggttccctagtagcaaacatggaactggaacgattgggactctcacatatccagagtgaaatggatgacatttgtcataagaaatagagattgagggtgagacagggccctgccaggacttagagcagtcaactagggtttgctaatttgtttcagggctaaattaggaagggcaagaaagaagggaactccattttgccattatctcacctaattcctagggcaatcttgaaagaaaggaatttcccatgttactaatgaaaaaaccgagactcagaaaggctaattgtctatggtcatgagctagtcggtgatggaatgaacccagcacatctgactccaaagtctttcctctgttcattgtcttatttatttatgtaatgattctcttctgcctcattccaaaacgccttccagagatacagactttagaagctacagacccatgaggaccctggcaaacagaaacaaagagtaggactagctaaagtcaaggcaaagattgctgtacaaactgcttgctgtggagttgtagggaaaggtggaatatttagaactaagcatccagatgttaagagcaaaaatggaaacaccatccattgtaaagttcacccagtcaccgggataaaaacaattcagttgcctctaagcatgtttcctggtacttgcttcggttatactgtgctatatccaccttaagagggattgagagagtttaactaaaactcaaagatgatttagttccatttccttatttttagaggagcaaatttacacccacaagaataaagtgactgaagtgacagatctgactgttttttatttatttgtttatttattttattttattattattatactttaagttttagggtacatgtgcacaatgtgcaggttagttacatatgtatacatgtgccgtgctggtgtgctgcacccattaactcgtcatttagcataaggtatatctcctaatgctatccctcccccctccccccaccccacaactgactgacgttccaatgggaagagccggcaccgggaccttagtcttcagggctctctccagtgtgctgatcaaaccttaagaatcgggtctgggatgaaactgtgtacacaccggaaggcttccctgttacctcaatggactgtcacttttttgtgcagcccgagaagtttgtttcagtcgatgtcttctccagggagagtagatttgctcctggaaactaaatctgtttctaaaccttttccccagggtttagacacttaggtaataatacaatttatagtgagtcaacctccaaaataaaaggaattctttaagggaaataaagacttttccaaaaacttagttaacagtaggaaaaggggctgggtgcggtggctcacgcctgtaatcccagcactttaggaggacaaggctggcggatcacgaggtcaggagatcgagaccatcctggctatcacggtgaaactgtctctactaaaaatagaaaaaattagccaggcgtggtggcggacgcctgtagtcccagctacttgggaggctgaggcaggagaatggcgtgtacctgggaggcggagcttccagtgagccaagatcgtgccactgcactccagtctgggagacaaagcgagactctgtctcaaaaaaaaaaaaaaaaaaaaggaaagaaaaaccagtaggaaaaggataatatgggctcaggaaaacaaatctagatttgcctattagtaaatcagaaaaaataaaaattggggccgggtgcagtggctcatacctgtaatcccagcactttgggaggctgagatgggcgtatcacctgaggtcaggagttcgagcctggccaaaatagcaaaaccccatctctactgaaaatacagaaattagccaggtgtgttggtgcatgcttgtaatcccagctactcaggaggctgaggcaggagaatcacttgaaccaaggaggcagaggttgcagtgagccaagatcgcaccattgcactccagcctgggcaacaaagcaagactctgtcacacacacacacacacacaaaaaaaaaaaaaaatgggaagactgaaatggcagtgatagagatctctataatttaatttatccttgatgggaaaacattacagtatctcagacaattaggaagtaaaaatgtcttcatgacaatagttattgatccaaccatggacaacaacccatttgaaaatacacaaataagtacacacaagtggcaggaatcttagaaaattaagagaattggtaggtagatattaaaccaatgtaattatgagacactaaactagtagggagaaagtcaatgtgtaaagattctattgctttcctaataatgaatttattatttggaacatttagctacaaacctaagaaaaataatgacggaaactgaaatatgtactatacatacataaatatccatctagagagtaagttttatgtagaataactcagagaaaacaaattactaaagggcttattttgggaggcgtccagaatccatggatttaaatgagttgaattaatccaatattatatttaccattgtatgacatgagttttctctttcagaactgaggcatatttttggactggctatagcctaaatttttctaagtttactcatggaaaatatgagtctatgagagcttgaatgttcaagaaggggaaaatgcagtaacatgtcgactgcacttcatattctgacaagtgaaataggaatgagattggattatatatcataaaaatgattatcctgcctgaaatcagctccaaaaaaattaacttaaatttattatgaggatatcaacattaatataaaacctggcttaggttttaaggtaaaaataattatccatggttgagtgatagcattaagtatttaacaacaacaaaaaaaactgaagcaagattgaaaacatcgtggaatcacattctaccttgatttgttttgaggacttggactggccagttttccaatctgtatgatgcagagattggcctagaatgattcctaagttttctttcttgtccaaagttacagtgtgttataactttattatactcatggtaattataatattgattcatttaacaattgtggtatttgaattataatcctaacacatggtacataaaatcacatatgagttaaatcttaatcacatgaattctacctcacatcactgaggtagaagggacaatatttaatagacagctgcaataaatatttttgtgaagaattcttttgtcataaatcaaaatcatagaccttagttctgaaaaagaaaaattatatcaaataatggtaaatacaatattggatcaaaaatttttttgtctttttacgttacaaaatttatgttacttatagcaagtatatttattctctaatatgagattttttaaatgtagagttcacttaaagtaagacaaactaatattcttaattttattatgatgtagattcttgatacatgcataaacatgagaaatgtcatacatttattaaaccacagtgtgcttggaacacactagacattgggatgaagacatttaaaggaagattcctgtcttcactagacttacaatctagttgaggaaaccagactgctgtatacaaactgacattaatcataattttaacttggttcaaaattatttatatttatagttactagcgtgaaatccatcaccctaagtctatcaattacgtggattaaaatctcaatatatcttttgatacattaaataagatttgacttttctgcggcatcagatctttgggttagtcactattgctggctttaaaagaaattccttggcttcaggtagttcctggaaatttttctaagcattatggaacaggttgtcctagacagaagtagcatggcctgaagccaacaataattacaatcaggtcttctgatctttctccctgccccccaacccccaccaccttcttaaacagctgtgaagggaagtgcttaatggtatccaaaacaaagaggatgggtaaatggcacattagtgatgtattcagatagtaggagttgaattgaattgccaatgccgaaggatagaaaaatattgaactatacgtaacctacatgtagacataatggcagtaagggcaagaaagctaaattcaccttaggaagggaaaaagagatttaatacatctggaggaaaataattagagggccagataatcaattgcagagcgccgccaggaaacatcgtgttgaaagaggccggggtgattacaaacgagtctcaatgtcatgaggcaacaaaaaggccagagcaactggaggccaacagtgctgcaccctgacacccaaggcccccatcagccttggaatgagtgtgatgggtgagcgcacatctggaatactgagtacatttcttacgctccgttaacacagagacaccaaaaacctggagggagttctgaagcaaataacaaggactattaaaagacttgaaggaatagtttataagggaaggattaagtcaaaggggaatgccatggcaatgggtagaaaacagtacaaaatatcctacaaagtaaaacaatgaggaaagggcaggaatgacttggggagaggaaacaaaaaaaccccaacaatgaagtaacttaaagtgcagaaaaaaaaattaaaactaattaagcagaaaaatgtaagccaaatggaggagtttgttgccacaaaataagtagtagtggggaagaaaatatgtaacctccgaagagatattttcaagtgcacaagtgcagaactctagtgcgagatttccttacactgcaggatggaaaatcatttacaaaagacagggccaaaagaatactgctaatggtgatgctaataacaatattagttgtaggagcacttaacaagccgttgttttgtgccaggcactgttttcagcgctttacatatgtgttgatgcatttaatcctcaaaacaatcctgccaccattattattatcaccatagtggctttgcagaaggggagttgggggagggagaagtgaagtaacttgcatgtagatggataccctagcaagtagcagagccagaatttgaacccaagcaggctggctctagggtttatattctcaatcactatgctttttgccttcttggaaaaaaaaaaaaaaaaaggaaagaaaagtgggataaacccgtagggatgaggaggaggccaaggaaagcacggggcttgaggctgttaagtgcaagctttttggaaacaatcgcttttgaacgttagtggggtgtggccttggtctgctgcctgtggctccaagtcatactgcattttgttggaaaaggaaaatcatcttgtggttctatgtgaaaaggtcagttcgtctctaagacaggaattcctcattaaaagaattccaactacacgtagtcagcacagaaggaaatcctgagtcacctgatgtgagaccctttgacactttgccctacactgatcaacgtgctcagtgcccctggcagaatgcttaagcagcgggcacttggctgactgtagacctaattggttcactcattcacagagccaacaaataaacattcattcaacaaacaaacattgccatgtttctcagactggagtctagattcttttaaaaataatataataagaaataacaattttagaaactctaaagctctattctatgaaaatgttttgaaggccaaatcagctttaaaaaatatgatgatttgattgggcgcagcgcctcatgcctgtaatcccagcactttgggaggcctaggcagatggatcgatcacctgaggtcaggagttcgagaccaacctgaccaatatggtgaaaccccatctctatttaaaaaaaaaaaaaaaaaattasccaggtgtggtggcgtgtgcctgtagtcccagctacttgggagtctgagacaggagaatcgcttgaacccaagaggcagaggttgcagtgagccgagatcacaccactgtactctagcctgggcaacagggtaagactccatctcaaaaaaataaaaaagataattcaagcaaaatcacaaaatttttaaagtctagacctcgtaaagtccccagaatacattggattcatgaacccaaattcaagaaacaaaaaggatggagccctgaactgtgtgcaaggatggagagtgcctcagagataaggcagaggcaatgtttgccctcaaaaagcttacagtctagcaggtgttcagcttctatatgaacatgactataccacaatggagaaagggaagatgacattacaaccacaaagacagtgttgtggaattaagacagagactgtgagtgaaatggcatctgctctggccttgatatataaagaggcaaataaagagaattgcacaagcaaaaatagagaggtgggaaccagagagcaaatagaggaaacattagctggagagagggacgattaacagagaaataggagatggggttggaaagggaaggattttgtccaaactcaaagtaggcctctgagggcaagctagcagagtacacttgattctgcaggcaatgagggtaatctgagattgcgagaagagggtgaagtaaccagagcaggtccttgggaagattaaccagtggcaatcgaagtggaaagaccctccatcctggctgggaaagtcagtgagaccatgagcatctgtgaggggtggcaagttaccagggatggcaggagggatttgagcactatttccaaggcagacctgataggaggtggcaactgcccagcaaggggagcgcaggagcaggcgaaagcagagggggctctggagggccaagcatggttcatggagggtgattatgccattcagaggaatggagtaaggctgaaagggaaaactggtaattccattttaggcaatggcattaggaagcaagtaaaacattcagatggaggaattctacaggtacaggtgctccttgacttacgatggggtgacatcccaataaacccatcataagttgaaaataaggtaagtcaaaaatgcatttaatatactgaacctaccgaacaccagagcttagcttagcccagtctaacttaaaatgtgctcagaacacttatattagcctacagttgggcaaaatcatcgaacacaaagccaataggcttgtaataaagtactgaataactcataggattgattgagtactgcactgaatgcataccaattttacaccactgtaaatgtgaaaatcttcaattgaaccatcgtaggtcagggaccatctgtagtcgtatatcaaagataaaagcaagctaaatacctatcccatagagacatcaaaattatgtacatcattaagtttaaaattcagaatgtgtgttttaagaccaatgtcaataaagtgctgcaattctagaattcgtttctattatcccaagccagtcttccaggaactacttttttaccatggatataagcgagggcacctataaaatctgtttaatgaagccaggcattggctttgacatggaaggcgtctggcaacagctttataacatcagaaaaactaaaacttgcctacatatgtatatgcatgcataggggtgtgtgtgtgtgtgtgtacacacacctatcatwatatacatacacgcacacatgcttatacctatacagacatatataaaataaagttttctctagccctttctacttgaagggaaagctatgtgtgtggctggagtgactaaacatttaggtttacccagaatcatgcttgtttatacctgcttttctgtaattacagcaattacaaataacatcctcttgctctctcaaaagtattccagtatatttatgactaccattctgctaggttgtaatgtctttttcacttcaagaatgaacccatattgttcctggaatcccagcttcttctttgcttcccgtacccctctcctgtcatcatcttttgcagaagaccaaatttctagtcaccctctcagagagaccgagtcagccctgtggcacagtggtctttcttggaagtgacatgccaaagttataaatgtgaaggccttccagtggcttttttagtgaactgtggtgtctttgtgacacatacacttctactatactataattgtatgaaaattagtaatctatgtagtaactctatgttgacagaatttttattatcgataatagatgtatacattcataaaatacacataacataaacacccattacatactatacatgtgatataaaccctgaccatatcccataaaaatggagtttaccatggttccctggtttggaaaatttgtactctctggatatgtaaaaacgaaaataagcttttcaatagtgtttttataattcacaattctcaaatagtaagttagaaaacttatcacaaagactgaactttcagttctccaacacctgcccggtggttgcattccaaatctcacgctacttctctgattgttccatcaacttaacaaaagagcatagcctgattttactccagtaggaccataagaaatgaatgcacccagagtgctgtgatcattatgatggtttcattgagctgtaatccatgtacttggatactacttctatttattttttaaaaatgtgtttgtgtcactttgccaaaggattggagtattacactaatgtcattttggcattcactattacctagggcaacttttgttttaccgtctctttttcaagtcataattttatacttatccatttatttatgattaatcattttacgtgaaaaaaataattcttttttcccactgcagccttttttggaaaatacctcaatgaatataatggcagctacatcccccctgggtggcgagaatggcttggattaatcaagaattctcgcttctataattacactgtttgtcgcaatggcatcaaagaaaagcatggatttgattatgcaaaggtaattttcaggcacttttacactgcatcaatttactttgtgcataatggggaaaagccattttcagtgagttaaactatccacaagattggctttctatgttctcacaatgttagcatgagaaatgttaaggtaattttaaactctaggcaaggaaaagactctcaaggaacgctgcctttgtgtagtgatttccctcattaggatgaaaggcaatcaggctttgatgaaagtatcatcaagaaaatcagaattctctgctctcttatgataatttttgtcctcccagttcccccggacccaaccaaggacttgtccacataatcaaatgttcatcttgtactgttttacttttcactgggacaaaagtatattttgtctgtggcttcagatttaggcacaagcataagagcaaataaatatgataattaaagtttgaaaaaccacattccttgcttttactcctgtctgaccaagcttagtatacgtgacaaggacaccttccctatcacggcaagcatccacaaaagtctctaatgctatcaattctaggattttcaaatcagttcagagaaactgaaatcaacatgtcccatagttctttgaccagtgggttctagttttgacttaaaaattcacaaagattttgtgatagctgacttaagtttaaatttttttcaaatcataagaatgaaggggaaaatatcttcgaatttagcatgcttatttgccaaaatatccccttcccttccagccatacccatctcttcttcatttatctagaagaagccgagaatctgctctatctagcaacctctcccaacaggctagatcacttggtagaaatcggaaggagagaacttgatttaatgttggcatattgctgtctttatgcttggcctgatttgagcacaagggacttgatgggagataagattaagtccagctcctttatacccttcagaaaacaatgaatgcaaatgaattcataaacattgctaataggcttccaaactcatgaaagttaaaagttagcagagaccttggaggcaaatttgagcaatgtcctcatttgcaaagatgagaaaaaagcattctagagtggctcaaccactcatcctaggtcatatccccagctgtggatacaatcattgcaagcaaatggtgcagaccacgtgcactaattgtcactgctctcctttgctgtctgtagggatgctttttcatgctccttgttcaagttattaacctttctttccctgctgtcctaaagagagcaaagtaatcaagattctctccaaatactaaatcagcgtaacttgttcattatcacagctgattaagtgtcaaagacaactgtgtctgaaaagaatatatatctttttttagtgaggaaaagaatgaaacagacactcccttggaagaggaaggggatagcctgtagacttgccctaacaatgacatgcggcacacaccatccctctgatactgcttttgcagctgttctggtccttaaatccacaacatgtgattagccatgcctggaagccttcaacatttgcaaatattgcctaaacactttctgaataaagtttatactggagctccaagccaatgacacacacttaaaagaagcaggtggtttaagttttcatcttttctttccttttcattccatttcctccctccctcttacagacctgcatcagccccccctgactgtgggttaagtcattttattagcaagtcaggctctaatcccagcagctgtattgctttagttgtgcaattaacacagtataatctgcaggaaatcaactgctccctattcaagtgtttcaagtaaattaactgatcaaatgttgcagcttttccctgtgctcctggattttggccatggctttgattactgattattgtaattcccacaggtggatttttcgtttgaagaaaatatcttttcttgtgtttatgtattcatgggcgtgtgtgtgtgagcgtgtgtgtatgtatgtgtgtgtgttctgcaactgtaaatttgaagtgggcgtgggtgtttcctgcccttaaagtaattaaattttttgccaaggaattacatcaatgaaacctgagactgaaatatgtatccggtgtttcatgtgttctagtacttttatcgccagattaatcattatcttgggcaaacacgacttgactttttttttccccattgctaagttgtgtattacttaaaatccatttttcgtatgttaccaagctagcaaccctagaaaacaactggcagctgattttctctattatcgaaaatgttcggctgccttgggaggtgcagccttccttcctgctgtagaccttgccacttcgtgcagtgaattgcttctgaggaaagcagttattcaaatgcgatctgatgaatgtcaccttttgtaatttttgttttgtgtcaaatgtatgtttcaggactacttcacagacttaatcactaacgagagcattaattacttcaaaatgtctaagagaatgtatccccataggcccgttatgatggtgatcagccacgctgcgccccacggccccgaggactcagccccacagttttctaaactgtaccccaatgcttcccaacacatgtaagtaacaaactcaactctgcgacctgccgaacatgcctttcccttttctcctcatcccactcctctcctttaccccgtttccttccaccctgcgtatccacaaggctttcttcatgaaaggataacttaagagcagaccacggaacaggcagagccgctgagcctgaaagaaagcgccttatctgggtggtttgaggaggaatcaaatttccagcatttacaagtagctaaatagaaaggaagagatgcacatagagtgaatgggggcaagttttacaagagtttcctttcgttgtcttaaataatattcgtgtgtctgatctaataatgatgatgatcaaatagtatgcttttcatagctgcacagtggggacctctggtctggttatagaaacatggatttattttccaggcgaataccgtagcagctttgctgcagacgtgcaattagaattcctgcagaaggcagcttgagtggcttgcccaagagggcttctcaggtcacagctttaaaataacctgatttttttttttttaaagaggcaggagtcttggagatggggggtgggaaggcacaagggagagggctgatggcgtggagggatgagacagaacaaagagctgtcgtgtgcccacaattctcaccagccaaaggtggaaaaatctagatgctttggcagcaaagaacatgattttgttgttcactcagttgacaccatttcttcctaagctttgccatcaatatccagtcttccacacagagcagtggagttggctctgtgtctgctgaaagcctgaccattagggagacagggaacagaaaattggtatctgtttcctatattgtgaaacctccaaaattggttcttaatctatttgtacttaaatatcatctcttttcatccacactggttattagccaagattccaggcagaaagaaccttacgaaaataggtaagtaactatgcaggctctctagttgccggtcactatacatccctagagaagtttttataaaatgttctcttttttttgagancagagtagntctntgctctgtaacccaggctggagtgcagtggtgcaatcttggctcactgcaacctccngcctcctgggttcaaacaattctcccacctcaggcttctgaggagctgggactacaggcacacgccaccacacctggctaattttttgtatttttagtagagacgcagttccaccatgttggccaggctggtctcaaactcccctgacctcaagtgatccacccacctcggcctcccaaagtgctgggattacaggcatgagccaccgcacccagccttataaaatatttttatttgtaccttaatgtaactgattgacttatgactcctggtcagtggtacacagatcatctctatgatatcatgtgacttagaccagaaagaaggaggccagagctgactcaggacaagaactaacaatatgaagccagggtgggttacctactgagcatgcccaggaactcagaggatggaagtgttttaatgcataaaatatcatcgacaaatcatgaaggttgccccagcacctgggaatatagctgggataagccattatgttttggagtcaactccatgggtggatatttaagcttctgaagatcttcccctatatacaactctgcgagtaaattcatgaatgaagcccatgtgtgacaagtggctctccattatagctcacttacaaatttagtagccaactgattcaatgaaaggaaaaagtcctgcgggctttttcaatacccctgaacccccctgttcccatttctgttgaatcagaaatcactttacctatctttgttgcattagcagaaacccagtctaaggtgacttcctataactgtaaactttacagatgttccctcaagctggaggagaaggggttgacaaaacagagtgttttgtggctccttaaaagtcagcctgcctttgaagctttgaggcaaggtcctaagcctgcaggaaaatcagcctcaggtcaagagtttataagagctcagttgcatggaatcagtactgcatgaggggaggagcctgcagagttctcagggtctcagcaatagctttttgaaaaacatctctgtgctggccaggcgcggtggctcacgcctgtaatctcagcactttgggaggccgaggcgggcggatcacgaggtcaagagatcaagaccatcttggctaacactgtgaaacactgtctctactaaaaatacaaaaaaaaaataaaaattagccaggcgtggtggtgggcacctgtagtcctagctactcgggaggctgaggcaggagaatggcatgaacccgggaggcggagcttgcagtgagccgagatcgcaccactgcactccagcctcggcgacagagcaagactctgtcttaaaaaaaaaaacaaagaaaagaaaagaaaaacatctctgattccagtaattaaaaattctatttcattccacgaatatttatcagtgccacatgtgacactatgcagcccagcagggatatagataagcgtgaggaagacacagttgctaacatttaaggacagataaactaaggcaggggttggcacactggtacccacagtccaaacctagcttgccaccagtttttgttaacaaaattttattgacacacagccatgctcattcatttatgtattgtctgtggctgctttcacaatacaacagccaagtcgagtagttgtgtcagataccatacagcctggaaatactatctcatcctcgataaagtaactttgccccaacctctgctctaggggcaggatgggcaagtgtcccaatggcaatatcaccaatagggccagaagtgacaagcacagagcagacgttcgcagggctgtggagcggggagggagaagccttcatatctttgaaggaaaccaggaaaacttcatggaccaaggcttcaaagtgggcctcaaaagatgggtaaaatttctgcagataattgtttagagattgggtttcaggaagagaatatggcaaggacacgtggtcactgtataagggaggcaatctaagatgtgtcctagaaactggagaatgggctacaaagaaagcagcactaaggaacaatgctgcagagggaaactgttgcagaatattgagggtgtcagtgagtttgtatgtaactgcaagcagagagtcactggaggttgggtagtaacaaaataggaggtggctcagacatttccacatgcaaatagattcagtagttcctttttagttcaaatgaaccttctattgcccttattagtgattctataaagtaaaatctacacagtgcagagggtggccttagaggctaacgagcctggtttcctgcctcagctgccctcactgagtgtaggggtgctttctttaatctctggaaacctccactgtctcatctgtaaaatggagataatactaacaccttgatgtgatgtcatgaagagaaattaagagaggcagtgtaagtaaagtccccacatagagcctgggacatacaagccacttcataagtgtcaattcttattgaacctttttattaagaaactaacaatattctatcattctggacctacaaaagggcaatttcatgtggctcaacttaaggtttaggggaagcagtgagagaaatgacaacttgatgcttgtccattgtgacatgacagacctcttgacaagctaagactcccattgtgatgagcctctcacacctggccattccaatggaacagacagggtaaggaccaatctggactgtgttatcttttccaggtgcaagtatgtgctatgggtaagtgccagtttggagaactcccttagccacaggaaatgaaaattcatgtgattgtttgaaggattcagcttctctttgctgctaatccttgggttttgtgcacctagaatgtggtctcctgcaggccctgaaagccttgaattcctggcatctttgctgtgaaggtctccctggctgctgctggaggaaggggctggaaggagtgagtgtgtgcacaggttcagagttcagtcttcagacaaaaggagtgagataaattgaagacaagctgccgatggtagtgcatggaactgctcaatgaccagcttccttagcgaaaacattagcaacacattcaggcaaagggatgcgagaagttaagtactttgcagaaatatttgacaggccctgcaaacactgagcaagaaaccataggttctccccaattgcagggatgcaagtaacgtgaacactttcctttcggtcatcttccttggtggtcaggcatcatctggatcactttcatctggcatcgggttataactacctgaccctctcagactggggtgaatgtatcatctttccaaggtgtttgccgttcccaacaaagagaggaagccagttcgctattggcctgttagctttacaaacggatggtagagcttatgcttaccaaggaagagtgaaaggggattatcgaccacttgttgacagggaaaatagtttaatcaaactgtaactcagctactcatggccactgagaaatctgagaaagcctctgtcataataacacacataataatcctagtattagaaagccctgcgctctggctaagactctactatacttttcagtaacttatttccccagaatctccatagggatgcaattccttcacccctgctttaagttacttctctctcctcgcctcagtgatgtcatcatatacacctgtggacaaaagccgtgacagggaaggagatgccatttacgtccctggtgattctataggaaactaagggacctccttatcacccttctatgaactatgcccctgtcagctttaaaaatttgttgttgttattccaatttttttttttttgagatggagtttcactcttgttgcccaggctggagtgcaatggcacaatctcggctcaccacaacctctgcctcccaggttcaaaccattctcctgcctcagcctcctgagtagctggaattacaggcatgcgccaccacgctcggctaattttgtatttttagtggaaacgggttttctccatgttgttcaggctggtcttgaactcctgacctcaggtgatccgcccgcctcaggctcccaaagtgctgggattacaggcatgagccagcacacctgacctgttattccaatttaacagttctttcttcccatacctgtaaatgtgtgtgactgtgtktgtgtgyrtgtacactctgtacactcacacacacacaaatacacaagttcaagtgaaatctaaatgcttggtaaaacagtccatgtgcactaatttgcaagagttgttgtgagggtagagcttttgaataaacataggttgtcaaaggaaaaactccctctgtgtaagccacaggacaaaggttttgaaacacctttgttatctaaagctggaaagaaatgtcttgccttaaaagaatttgcacattcgtacctctttccacaaatacgtgaaaggacgtgcttttgaagataagaaaagtttaaattctacaaaaaaaaaaaatctgatttgggcagaactcattngncntcccttttctctgtttctaccttgttcttctctgggtggatcatttactacttatactgtcagtgttggtgttgcttgtttacttagatccctgaagtcgagttgcacaactccagggggcattcagataaaatatcatgtgaatgatgccctggagttttgcaggtagctttgtcctgaagacagggacaaaaatgtttcatctctttacctcccagtgcctggtggacatgccttcggaccaagtagttgcacaattcattgttgcttagcaaatgaacaaatatgttcacctcactaaatagctgacatgaaaacattttaaaaatagtatcaagatatttaaacagtcgattttatgaatttaaaagacacctagagatactacaattccgtagttttttagattaaaaaacaaagacccaaagtctatattttttaaaggaaggcccagatggttttgtgaaggtcatgtgagtatttagggacaaaactagagctgaaactcaattctcttggccccaggtgatcttctcactccaccagacttactcagttcacatcacagtcacaattcagattagagctatgaacaattctatccatttgcacaattctaactggtgtttctaacttcattaaaagactctgaattatttttcttatatacctctaatcaagatcatttggtattatcctgcatatgttcaaatgttacctatctacagatatttgaacttaggtggggaatatctccacaaagtccattaagtaagttcagttttagtgaaaactgagatggtgcagcttgagagattaagtgtagaatttccaatgtaatgctttgaatgtgtaccttaaatctgtatcactggcttattctgggaattgaagtcttatttcatttctcagagaatgatggttctgctaccagtaatctttaagggttagatcattcgggttttttgtttgtttgagactaaataaatgaagaaaacacatgttagatacaaaacactagaaatatattaattttcactggagcgacaccaaaggccatcgacattaaaaatgaactcctaagttctttgcaattccccaggtatagatttaatatacaacacatgcatctcttgaaactctttctttgctagtaagaattattctcctgaaatacccacctgtcaaaaagaaaggtaacattattgatttttagaattcttatttctgtcgtgtcagtaagcaataccggaaagaaaatcaaacactcaggagaattggcatgatggtgaaggttgagcttacaagtacagtggactcaagtatccatgatccagcgcactgagcaataaatccaaatgagcagtgaccacaggaaaacaatatgcagggaggcctcgctgggaaaagctaaacttttatatatgggaatagtctatggaggattacagggatgttttcttgggggtataaggtctggagtgtgcagtactgggtgaagcccttatctaacaggcaacagaaaggtcttcccaggttaggcacacgtgactctacctccaacacagaatttttttttttaagaaagcaacagaaatttgcaaatgatagtctggtcttttgtcctctcaattttaaagcaaataaccagtattgtgttatctaccttttcatggatgcatccagtgtgcctagaagggccagactttattctgtatttgcaacaaaagtagacccagcaactgatgggaagatatctgattgggaagcagaagcagctggtattttaaatcaggatgaaagctaagattttaggactcacttttgataggaagaaaggatatatcaattttccttttaatgagtgggatttttgaggtactttgtggggcctctggttcaagactgtggccagtgtggtgttgtaggaggggcactgatggagagctatcccggtgcattatttctgagccacctctgtgcactttacttcctcatttgtaacatgggactaatgtgccctgctgagtcctcagagttgctgcaacaatcaaatgagctattaagggataagctcttttccagctacctatgagaatgggtatgatatggtcccagaatttgctctctagagccacagaaatctcttaacccctacaagaactctttaaagttgttatccccattatatagatgaggaaactgagacttagacaaaaagttgtccaagatcacataatattaaggaacagagctgggatgaatatttgagtctaattccaaaacattctggaataactcaatatgtggttttccatttctcccaaaaacaggtacctgcttttttcagtggcttgtgttccagctgacagctccagggcctgtttgaataattcgaagacaatccttagttaggaaagcaagctttaattatcactggggaacagaaggccgcatcttcgaggaatttggcagacctcagcagggggcaaccacaggcctttggcaaaagatcacttttcaacaacattgtcaattccagtgacccccgaccttccacctgcaggtccctgaacagctgctgttctgtgggaagcagtggcagtctgtcttcctttaaaaggcacatgcacactctgtccctgctgcctgctgagatcccacctgggacctcatccccagagctgggggtcatctcccatatcaagaaattaagaaaaataagggggggcaggaaaggacagctttgacaacagtccctgaactttcccttttaatataagccagatttaacgtatgtcattctgtaaatccgggagtccaatttgaggcttgtaatttgctgcaagcttccctgttcctccaagtggggtggagctatgccaagcacatcaaggtaactggtggaagatataatttccccactgtgagcctgcatttcagttccctattgtaatttttatttgtgttgaggttttgtggttttaaaaaagtcaaccagatttatttttaaattaacccagcccaacatcaaaggcaataagtagaggatgtttaggtattataaagaaaccctgtgtaatctgttatagctgtattctttctcagggcatgtaatggtaaatggttaggggcctttcacaaccaactttctatatttctctgacctcggactaccctcatgggcaaaaaaccctttttgaggggatttagtagcccctctnctcctcctcctcaacctcttaatctaatcctgtttgtaacgcaacatgctgcatgaagaatacgaaacatgggcttaagtccctccccacttcccttatgactgtggtttacttttagatatgaagaactctttcaggccaaaaaaaaaaaaagggggggaccatttggttaacgaaccattttctttggtaggcaggagaaagtttatattgaaagtttatcttaaggatgacaggtcatacctgaagggtttgttttggaatactgtggattttttctaacccaaataattacaagagagttccttgtttattggctcatggaggaaattcaagcgcctctgttctaggcattttaagtgctctgtatatatggtggttgttcctcaaaacagctttgggtttgttttttgttttttgttgttagtggtggttttttgagatagagtctcgctctgttacccaggctggagtgcagtggcgcaatctcggctcactgcaccctnccacctctctggttcaaaagattctcctgcctcagcctcctgagtagctgggattacaggcgcccgccaccatgcccagctaatttttgtatttttagtagagacggggtttccccatgttggccaggctggtctcgaactcctgacctcaggtgattcacccgcctgggccttccaaaatgctgggattacaggcgtgagccaccatggctggcccaaaacagctttttaagaaaagtgctattaaccccatttacagatgagcacatttgagccacaccctcttttccacactctaaatcttgtctctttctttaaacatgagttacttatacttctgagcataactgaggcacttttagagacagtgtcttctaagctcaatgtgatattatttgtgctgctgtgctgctactgggtaaccagcacccatcctggtcaccagggtaactttgtcaaccaagaaggccaaggatcccnaaaccagcattttctactatcaaaagagaggttctgcaaatccactggcaggagagaaaatataatagcaggtggcatttatatgacccagtgtgcatggcagtgtcccagggtatcaccgtgaatctcagaaactccaggctttccccatgggaaatccacaccaccacagatccagtggaggactcggtcaagactcctgaaatcaaagaactcacagtgactgattctttccctagttttataatataaataatggcatggggtcacattcagccgtcattatccacatcatttcactgatgggatcctcctcagacagagattgggaatcagatttctcggtcacataaactgttgctcattctgtgaggctgcctatttgtaaagttgtggttcttattaaaagcaatctcagacgtagcaagcacccctcacttcccttctcattcattttgttaaagcaaatgggctttggaattcaggcctgtttctaccacttactaatgttgttaatttggaggagttcctcaactttgccaaggcttgattttctctgctgtaaagagggaataataaacctattttacagagcagctgagacaattaggtgagttaatgtatataaaatggtttgcataatacccaacacatattaaactctcactcggtttttaatattaaccntnctnatgtngcttaataacattgaagaagaagattcaagtagattatagtctgttaaagagttcaaatataaataaataattctcagggtgagaattgccatagcatagatatgttacgtacccatggcagagcgtgaggtggcagcatctaatggttgagggagttgggtgagacatcaagagaaggtgacatatttttttgagtacccagtggaaggcatgggataccatgtggatctctgcagtagattaaatatagacttgaactaacctatcctggaacaataggacaatatccttgtggcttacagaaattattccctgcacctatattgatttgtttattaaacgaatagctttattggtaaacatgtatattgcggaagtagacttggttatcattcccacaagtccagttaaagtaatggcatctatataaaaaactcataaaaactagatatgtaagtaatcaataaaatactcttctcaagtattcaggagaaaaaatgtgttgaaatgatgattcatcattccacataacgtatttgtgactacatttaatagcctcattagcaataaaatttttatgagttaacatcatatgaggatattcccttgtaccttaccgagactttatctgtagatttgtaacataaccataatcatcttggtatgtttcttacacattttattcagtgaacccaaatgaacttctaattacatgttcagctgccagtcatggttttatatgtttgaatatatataccttcagaggatatttgctctttggggtggtgaagacttcatcttcttataaatgcaaacagaagatagttggaagaggaaaatgttttagcagtgtctcaattatctctccttaatgattatttcacaacctcgagatattttcctaaaagactaagtaagaaatatatagtaagattcctttctggatattttcagaactcctagttataactatgcaccaaatatggataaacactggattatgcagtacacaggaccaatgctgcccatccacatggaatttacaaacattctacagcgcaaaaggctccagactttgatgtcagtggatgattctgtggagagggtaagcacatgaacctacctcagtgatagtttttggcccagcttcctttgtgtagacttattcttgccaatcctgtttggttttttccccttcattttccagcatcattttgagagagaaagaaagagagagagtatgtgtttagtggcttaatcatccctcccttatcttgtcctcattccatctacctctccagggttggtttcttatggagccagtaaaaaagaggagagaaaaatcaaatcagcgtagatcaggggccacatcctcaaaggcaataaagaattgatggagcttgtgctgaacttgaactttaagttaagggccccatctaaaggaacagcaattactcagctccagctaaattttgccatgtagaaatgtggatcaagtatcagcaggtcttctgacttttttaaagaagccagaaacacaaaaaattttatttgaaattttctgaactttgaaacatagtataagccaaacaagacgtgcctcaggctggatttaactggatcaggctcagaagcagcctgtttttaacccttggtaattagatatgtgatgataattttaacaatggattttcaaagtacaacctataaagtttgatggtagaggttgttgtgcggggtgtttttgtttttgttctaccaaacaagcaaacaaaaagcctaaaagtagaatgtgctagattccaaaaagttacatttcacctttaccattggacctttccctcccagactgtaagcaaatagaaaatgtggataatgttattaaagcaactcttgccttttaaaaataacaggaaaaagatttgggggcaatcgtggcaacactattgagcatcatcttataccagcacaattgattctgacttgttcctttgctgtatttcagctgtataacatgctcgtggagacgggggagctggagaatacttacatcatttacaccgccgaccatggttaccatattgggcagtttggactggtcaaggggaaatccatgccatatgactttgatattcgtgtgcctttttttattcgtggtccaagtgtagaaccaggatcaatgtacgtatttctctgtttgcaacattcaactgtcgtacctcaagtgtgtctaagataattcaattaccagtctcagtatctggtttcctttcatccaaaacaaaaaaggatgtgtgtaggctggttaatttcgaagatgaaaaccttttcctccctgccacatcttaaattagctcaagtatactacttaaagagaaaggaaaaataagtgtatcaatgactaattctctcaaattgactggaatctatgtctttttggtctgtgtgcacagacaggatgtgatcttctgggatatcacccttctttgaatcagagatacgctgtcatttaaaaaaaaaacctgacaccatccttttagtgtttaacttttaaaaattattccgaaagaaatgtttttaaaagataaattttgaaaagctggcttttcttttaaaggaaaaagagctaaaggactaggctgctatttctgtcactgtaggcaggtcactgcttctctttgcatctctattttcccatcatgaaatggccttgcctattttcccatcataaaatggccttgtcaatcatctcaggatgttttgaataaaatgggattgcatccatgaaagaattatggaaagactaaaagaaaaagtggaagtagaatccagaagctggaatggcccttgaaaagcatctagcctggacccctgatgtaacagtgaagctaggcagacagcgtcagtgcccctctcagatccctgattctggaagtggtggcagtggggcccagagcccagatgttctgaatctcccccgagtaccacatgtgctgctgcatcatactacatcctggagagagggcaattgaagtaagaaaggtttctttgaagaatgttattgtgcttcctaagattattagaaacaccctgagaattgtcagatctatatctagaaggctttatgttttaaggactagatagcatagattgaattcaactgtaaaaactgtacatccttttttaaaatattgattttaaagctcttgttcaacggaaaagttatggactattgggttttaagcaaaagtatgcttgctgcaaaaaccatgtatcaggctgcatcttgcctggtgatgtggtcagaatacaggggtgcaggcatctctccagcctgaccctggcaagagtcagttaatcttgctcagtgccattgctgtgatcacacacccacccttgccacacaactacccatgcctaggagaccagatgagagggtgagaagagttgaaggccaatgagtcactgctgtagaaaaagcagccctaagtgccaccttcccctggcattggatctcagccatcaccgtgtgcccctttacagagtcccacagatcgttctcaacattgacttggcccccacgatcctggatattgctgggctcgacacacctcctgatgtggacggcaagtctgtcctcaaacttctggacccagaaaagccaggtaacaggtgtgtcattgttcctcctctcagccagccccaaatacactgagctccagctggtgcccagagccagccagcagctgaagacatggaggcagaatatgccttgcccacaaggatcaccccaagctgagcatttctcagctgcttgtgaatagcatattgatggagatgcactcatggtctgtgggaagtgagaggtgtttctttaaataagctgttagcacagatccatttggaaaaacgtccagatgccaaaagtaaatattatcattttgctttcaggtttcgaacaaacaagaaggccaaaatttggcgtgatacattcctagtggaaagagggtaattattggttcctggggtgcttctgggaaccagtcctagtgggcagctttccctgctgagtattttttttctccttatttttgtttactaagcatgcagatttcgtaaacctagtcacaagattgaatggtttgctgcttattctgtagtggtcaatagagtaataattgctggatcagaattgtaaagaataaccctcaagttggttaattggtacaaaaacacagttagatagaagttatagaatttgatagtatagttgggacattatcgttaacaataatttatgtatatcttaaaatagctagaagtgaagaattgcaaagttcccaacacaaggaaaagataaatgagatgatgaatatcccaattatcttgatttgatcattacacattgtagactggtatccatatatcacacgtacccccaaaatatgtataattgtgatatatcaatttttaaaataccaaaaaagcaagagaatgacgactccacatcccccaaaaagaataaattctcataagcttggaccaaagcctttatcatgggtgtagatttactgttgcatttctcagtgctggtttctaatcagaccagtggattgagtttctctaccatcctccccacgttcttctctaagctgcctccaagcctcacccggcacccttcttcctacttcctacttcttttccttgtgtgcctttcctagttttaaatagataaatgtatgccattgtaattatttccattgtcacttctgggtttccccttttggttcattaatacccattgccttgtttttctctgtacataaattaggagagagaaaatatttgtataatttttttaacaaaaggaactttgagcatgtaaaatgaaacatgtatgcccaaattttgaaattaatgcttttgggaagaacgaatcttttcctgacctctcatcttcatcctacccagtttgtcattttcataaaggacccatcaaatgttgaactcctgtagacagagctttaacatctatttcttgctgtttaaagaatgtggagtcatgtgacagggtaaaaaaaaaaagggggcaggactcagggaccgtaattcagatcacttctcatgtacgaagcttttccctttttgtcgaagcaaatttctacgtaagaaggaagaatccagcaagaatatccaacagtcaaatcacttgcccaaatatgaacgggtcaaagaactatgccagcaggccaggtaccagacagcctgtgaacaaccggggcaggtgagtgacgcaggctttctttaccaccactcatgtgcttctccatctctaatttagaaaattgtccacatataaaagaatgtacatttgtgtataaataagcttttcctagtggccttgagggcaagctcactgagacacctctccgcggacagaattacgtaactggttcaggctgggcctccccattactacttgggctccctccagttaaaaaagatgatgatctcagagaaagttctatgccaaaagacactggtttcctctgaggagaagattcctgttatagtccctgttaactagtcactgaagagttgccaaaaggctacttagtcaaagcacaggtacgtgctgagcctcttggcagtgaaccaccccaagagacatgatagggccttcaccctaggctaaagtcagaatgtcatcttacccccagtagaggacagagcctgtgaccaagcttgaggaatgagaagagaaaccatattctgtttgtttattgttcctacttctgctcacaaagattctggcatcaaatatttcattagaatagatcctcttcgttagtagaaatattactatagaccccagagctacccagaataccagttattatcagtaagaataaaagaaatactgtgtgatgaattaacattgcttttaaagaaagtgagtacgtatgaatttaaaccagtttaaaaccattgattttaaatgcccttgattgaaatgtatgctagctaaaagaaaatgctgtgtcatgacaagaggaactgaactttggcccaaatcattgcagctgagaacaaaatcagaggaaagtgaaaaatactaacacatagtgagcatttgtcttacatcaggcacagtacgcaggattttgtagcatttactcaatttaatcctcacaactgtagagtgaggtgggcattggcatctccattttacaaatgggcagctgggattcaaacaggagttgtctgattcaataactcaggccacttgctgccttccaaggtaagttacaataaccaggtgaagagaagttcaaatctgtgagtcttttttaacttaactgacctctagatatccacacaattcaccaacaccagttcaagatgtcaggctcatggaatgagtaggtaacaaagttattattaaaatggcctcactcattatacgcttattatatggtatctagcttgttgaatagacattcctaataaacaacttgatccttataccctgcatttcctcatgctttcttgtacacaggatccctttgaaatagaagaggatagggagggagagctgttgaaggaagggctaaaactaagccttcactacattctagtacatcttaattttcaagtgtttagtggagaaaagctgagacctattcattatattttaatttgaagtcttcaaatctttcttatgaaacctccaaatattattatgaataaaacctcagaattgttttgtagctctaagatgatttttatgagctagcctcaatagactaatttacttttattcaggagttgcaaatgttcagtgttaaatatatctcatgcaaattggtgatcttgttactcttttagctctaagaggtgaacattatagccttttgggaataaggtacactgcctacatttcagtgtgtaattttacaaacctctccatatggcttgccctaaaattttaatatatgtcctaaagggcaaatgtagcataaaccagattatggtactttggcacaagcttttcactcacgagctgaatgctaactaagttacaaacttaattttgctttttcatattttttgaacttgttttggccccatgaaatgctttcatatctggaattttcttccactgtttcatttcgctgtgaatcagtctgaatttagatccattatgtggatatatgagaacgtcagcaatggtctcttttagaaaggcctgaattcgtggaacaaagaattaggctatgccctgatggtgatttctttctatagaatttctttatattgggcctgagtgagctttagaagtgaagacctggagagtatttcagattgtctctagcttcagtgtatccacagcactagtgaattgttactctaatcccgaaccagcaggatcagcatccctgagagtttgtcagaaatgcaaattctctggctattgcagaccttctgaatcagaacccctaggggtgaagcccagcaatctgtgtgttaacaagtcctccaggtgactctgatgctccctaaagtttgagaagcactattctaacccacgattgtgtttactggtggccctcaaaccatagcttaggaatctaagaacttcaagaaaattttgagccttaatctttaaagcagttattgaatctgtgggtcaaacctgatagctgtgttgtgtgttgttgttttgttttctttgggacagggttttactctgtcacccaggctggagtgcagtggcgtgatcatggcccactgcagcctcgccctcctgggctcaggttatcctcctacctcagcctcctgagtagctaggactacaggcacacaccaccatgctcgactaatttttgtgcttttttagagatggggttttgccatgttgcccaggctgatctggaactccaggactcaagtgatccacccaccttgacctcccaaagtgctgggattacaggagcgagcctccatgcccaggcagctctgttgtgttctatcgactttttatatcttggccttttgctctttctttctggctactttgaagattatctgtttttggcgacagtatccctgactttaaaaaaggaagaagaaaattcagaataatgacactgaattgttcaggttcgaggtggcagcggaggctagaactgacctgcttggaatctgctctctctcgatgtccctcctgacatgcgccctgcttccgttcctcttaacaaggtgaatggccttcattccaaggcaacacagtcaggttttgacactccatggggaacaaagggaaaatcagcatgactagccccattctcttcactcttaatcccagagatagtgaatgcccccctcctaccacatctttgtgccaggtcacctaaaggttgtttggtggagtcaatgtgggtgcatgaggtaagtcaacagagaaaagagatccaaaggttggggttagaatattggccgccaccactttctagttgtgtcttctcaaataggtcacttactttctcctgagtctcaggttttctatctctaaaatagagaaaattaacctcacccttgtgaggattaagtgatattatacatgtaatgtactaaagtgagactgagattttctctagtgtgcgaatattgggtgttattattattccaagccatcttacctgctgttttcattcctatgaagccaattagaattaaaatgggctgaggccgggcacggtggctgatgcctataatcccaacactttgggagcccgaggcgggcagatcatctgaggtcaggagtttcagaccagcctggccgacatagtcatagtgaaaccccatctctactaaaaatacaaaattagccaggcgtggtggtgggcacctgtaattccagctacttgggaggctgagaccggggaatcacttgaacccaggaggcagaggttgcagtgagtcaagattttaccattgcactccagcctgggcaaaaagggcgaaactccatctcaaaataaataaataaatataaaaagaataaaaatgggctggaatcccagagacttggcatcacttcttgactatgtgaacacaacaaccagcggggactaattaagacaacatggacatatgtgtttgcattacttccacgttcctgaattaatatgagatggagtgtgaattcccaccactctctcagctgggcgttacacccccggacacgtttatgtacagacaccntncncccatccccctacaccatcacacacatgcacatgtgcatactgaggggcaaatctcgacctctttcttaaagcatgtttgttccacagagaacaaagagcagtgatgctcaatgctggcggcacattaaactcacctggggccgagcacggcagcttatggcttactcccataatcccagcactttgggaggctgaggcaggagttctaaatcccctaagcccaggagttctagaccagtctaggcaacctagggagacgccgtctccacgcacaaacaaaatagccaggcgtggtggtgtgtgcctgcagtaccagctactcaggaggctgaggtgagggaatcgcttgagcctaggaagtcgaggctgcagtgagccgtgatcgtgccactgcaccccagcctgggcgactgagtgagaccctgtctcagaaaaacaaaactaaaataacagaaaataaaaaataaactcacctgggtggcacttgaaaaatgctgatgcaccccccagaccaaccaggttaaaaatgtctggaagtgaggccaaggaatctgtattttttaacgaggttaagaatcacaggcctagaaccagagaatatcaaagtttgaaggaatcttagaaatcttctaagttgaatggtatcatttttctgataaggaaatttaggtccagaaaagttaagctacaaacccaaagccaaaacctgcatctcttcacttcacgttgagtactttcttccctgtaacatgctgccactgcaaaattgcaagacagattttccctttgaaactatgaatggcaatcaccactcacggtggttctcaaccctgactgcacgttagaatcatatgggcagctttagagatgcttatgtttaagtcccagcccaggcaagttaaatcagaacctctgggntatgagacccaggtaccagtgttttttccaagctcccctgatgattcctacgtgcagacaagcttgagatccacaaatgtcaagtgagcattaatgggttggtttttcttcttcttctaggcataggtattgacgtcttaaataggagctacataaaagagaaattccctgggcatccaattttgaaatacactttacatattatctggcatttaagtggaaaaaagcagcctgctttgttttgatagggcaaatatcacatccttttgatgagttgttgaattccagcatctttacaatttagtttgcctttctactattggatcaatataaaatcaaacatttgtttaaaaatctgtgaggacccctgcatcaagcaagctgatgctattataacggaaatagaatgtagtttgttgagtggaaactggtttagctccaggatggatctttgttcctatacaaaacttatctctctggccgtatatccttctgaccctttgtgaccagcagcagagcatgaataataagacatttaccatggagatcctcctagaattgttagttttccagaagcagacaaacctgtttcccaaaactcactgaactctggtcaaaatggcagcatggctcatagacatcttcccctggctaacctgattccagagggcacatccagaaggattgagctcccagtgccatccttttactgaattctcctctgtgcatgggtccattgtggaccactcagcctttaaaccttgcttccttccctcttcaacccatgctgaagctcatgtatgaacagttgttcatctaattaaatctttgacttctgtgcatttgttctaaacaagtcaaaaaaagacaaacatgagaataggcattttactcataaactgtataatacagccccattctgcttaatttgtactgtgtcttcttttccaccatttcctaacagcccatcctaatcaggtcctcctctatgtttcttaaatgttacatgtgaatcccactttctcacttgcatggaggttgttacttctctcttctcacctaaggctcaggtcctcctctatgtttcttaaatgttacatgtgaatcccactttctcacttgcatggatgttgttacttctctcttctcacctaaggctcacctgaagactcatactgccttcgtaccattctccttttcatcagtatcctgatcaaggtgctttgggattacatcctggatatactgctttcttggcatttgcctatgtgcaagtttcttaacctaactctgcctcagtttcttcatctgtaaaatgggcatcatatagttcttgcctcataggctgtggtaaatgttatatgaattaaatgtatcaagcatctgggacaatgtctaggacatagaaagcactcaacaaatgctggttgtcaatcattggccaagatcagtttaccaatttcattttctaggaattacaataatcatacatcttccaacattccagtgttgacttttacaagggattatctagattaaaatctataacaggtaacatttctctctcttctgcttctccttttctgttttccgtccccctctctttcccatctyacaccatctcaaagaaaacaggccaggagataaatcctcctggcacaagtaacactaattcatatttgtgagagaaaatttgacaatgacttgagctaagtagcagtttggacaaagatgtgaatatggtctttgtatattccccagtgttaagataaatattttaaacacatgtccacatgcaggtaacttttttatgatgttcatgttggcatgaataataatcagtttatcacaaaattactatacagttgtgacatttcagagaacatgatttgacctgcattatggccaaatccatgtcataagacatatggtaaccaagaactagtgtgtgtttatgtataaaattaagctttcactgcagtgcacctttgaaaaagttgtacacaatttttttaatttttctttttatttcaatagttttcgggatacaagtggtttttggttacatagataaattctttagttagatttctgagattttagtgcacccatcacccaagcagtgtatactatacccagtttgtagtcttttatccctcacctgcttcccaaccttcccctccaagtccccaaagtttattatatcattcttatgcctttgcgtcctcatagcttagctcccacttgtaagtgagaaaataaaatatttggttttccattcctgagttacttcacttagaatagtggtctccagctccatccaagttgctgcaaaatacacattattttgttcctttttatgcctgagtagtgttccatggtgtatatataccacattttctttatgcacttgttggttgatgggcatttaggctgggttccatatttttgtaattgctaattgtgctgctataaacatgcctatgcatgtgtccttttcatataatgacttcttttcttttgggtagatacccagtagtaggattgctggatcgaatggcggttccattcttagttctttaaggaaactccatactgttttctgtaatggttgcactaatttacattctcaccagcagtgcaaaagtgttcctttttgccacattcacgccaacatctattgttttgttttgactttttattatagccatgcttgcaggaataaggtggtatctcattgtggttttaatttgcatttccttgatgagtagtgatgttgagtattttttcatgcttgttggctgtttgtgtatcttcttttgagaattgtctattcatttctttaccctacattttgatagaattattggcttttttcttgctgatttggttgagttcctttgtagattctggatattagtcctttgttggatgcatagtttgcaaatattttctcccactctgtgggttgtctgtttactctgctgattatttcttttgctgcgcagaaggtttttagtttaattaggtctcattcatttatgtttgggtttttttatatttgcttttggggtcttagttatgagttctttgcctaagccaatgtctagaagagtttttccaatgttatcttctcaaatttttatagttttgggtcttagatttaagtctttgatccatcttgagttgatttttgtgtaacgtgagagataggaatccagtttcattcttctacatgtggcttgccagttttcccagcaccatttattgaatagggtgtccttaccccaatttatgtttttgttaactttgtccaagatcagttggtggtaagtatttggctttatttctgggttctctattctgttccattctatgtgcctgtttttatgccagtaccatgctgttttggtaattacaggcttgtagtataattagaagtcaggtaatgtgatgcctacagatttggttttttttttttttttgcttaatattgttttggtgtagccaatttttgggttttttttttttgtttcttactcatgaaaatggacacaagtaggcataagtaagaacagagaacaacatccttaaccaatctgagaaatatttgcaattcaaaatgcagaaattataatgattacttagtggatacttcaggaaggaaaagcaaccagaggtcatctaatattgcactaagtattttacatggaaaactgttctatgagatacatattatgcccattttagatatgaagagactgaaactcagatgggaaaataacttgaccaaagtcacacagctagaagaatgacaaacctgagttcaaaccaagatctgggtgactcaaagcttctgtctctctcactaaataataattattttgtacagtttaccaccagaaaacattagcttgcccaggattggataaactttttaaaggccaattatagtactgctctaggttcatatagtacatcttttccttagaacttcaaaacactcaaacaatctattctcatgactatccatgaagccaggaggagcaagtattattttatcggatgtggaatccagaagaacaaagagattctgcaatttgctcaaagccatagagttagcagcaaaaaaaaaaaaataataaaattaaggtctttgaatcccaacccaatactcatctccattaaaaatggctacctcttatcaaatacacattagatcacattctttaagtaataaaccatgtgtgggtgtatgtatgtaataataataataatagcagctgcttttgttgagtgcctgccatgtgctgagttcttaccgtgtgttatcgctaatgctcataactctgcaaaggctaatgtggcatagcttacttgctcagggccacatagccatgtgatagagctggtgttcaaatccaggctttttgagcttgcaaatccagactttttcctttaagccacaccgatgagtaaaaaacaccattccgagtccaagacagaatataggtaatattcactactacgaaatcctatttcagtaaatgacttgtgacagcactctgggttgtagtgaggattaaatgaaaaattcataaagagtgctctagagcagtacctgctatcaagcaagagttaaataaatgatcataatcatggtagtcaagatgatgatgaatgaaattgtttgaaatgcgtttgacatatttctcattagatttgattccaccaaactagctgcacactatttgtatcctcataccaaaattgccagccttctcttcttcatcaggtgttatttatatacaggcagatataatcaatcaaaaacactaacacataattacctaaccaagtgattctgtgctgagataacttctgggaatgactcaggaatatgagacatggcccttgcccttaattccaacttccaccatagttggaaaggctgaaagaaaattataacaacttaagaaattatttaaatagttttatctagcacctcacccataattgctgtgcagaaatatttgtggaatgactgtgtgctaaattattggcacagactgataaatcagacagaaggagaacggaaataatgtagttgcagaaaacaggaaaacaatttgcagaaggaatgaaccatcagtgaagatggagacaatcggatttggcaattaactgatttactgataaacttcaagagcatagataatagaaagacagtgtgacagctgtgtttctgcaagggcacttgttgaacaaagctcatttctgaggctgactccacacatcccattagcaggtgcctcacctgagctcaggctttcatctgattcctgaaactctcctgcaatgcaaaaaacatcccttctcattattttgactatttaaatggcttgcttcatgagtttcagagcaattcttttaaaaattctctttatctgcttccctctataaactctctaagatcaccactttagttgtagctatttcaaggttttattgtgcagtcataaaaattgtcatgatatcgagttctaaaatggctgtggcaatgtgtgataattacatttcattaaaattcctagtatgcttgccagtaggaagattttcaaagcctctagttaattactttatctaacagggtctatgactttttcaaagggtccatggtagaaaaaataattgacatttttgttcatggctcttgcttcatccaagtatgtgtgtagatatatgtatatatgtagtatgtatggataatatgtttgtatgcatgtgtgtagacatatatgcatatatgtatgtatatttgatttcgtatgatacatcatcatagccaaggacagtgccagacatccagtgtggttaaattcaactcttcagaaaggaaacaccttttcccttcatctctatcccataggaaaccaacaaagaatttggctaatgggaaattcaactaggattccaaatagcctaagtcactaaaacttctgcctacacctttgtgttctacaggaatctacttgtaccctcagctcctccagggcaaaaacaaacaaaataggcagaattctttgaatgcattgtgattataaaaaccacaggttttcactatagtcatgtgctttaaaaattagtatttgtactaaagttgatataaattggatccacaaaaagactttagaccattatttttcaagaatatatatatacacacacatatatatgtgtgtatatataatgtgtatatatatacacacatatatgtgtgtgtatatataatgtgtatatatatacacacatatatgtgtgtgtatatatacatatatatgtgtatataaatatatatacacatatatatgtgtgtgtatatatatatatatatatatttttttgagacggagtcttgctctgtcacccaggctggagtgcagtggctcaatctcgggtcactgcaacctctgcctctcaggttcaagccattctcctgcctcagcctcccaaatagctgggactataggcatgcgccgccacctggctaatttttgtttctttgttttttgtttgtttgtttttggaaacagaatcttgctctgtcacccagcccggaatgcagtggcatgatctcagctcacggcaacctccgcctcccaggttcaagtgattctcctgcctcagcctcccaagtagctgggactataggcgtgtgccaccatgcccagctaatttttgtatttttagtagagacggggtttcaccatgttgtccaggctggtcttgaactcctgtcctcaggcaattcacctgcctcagcctcccaaagtgctgaaattacaggcttgagctactgtgcccggccgttttttttttttttttttttctgtatttttagtagagagagggttttgccacactggccaggctggtcttgaacccctgacctcagacaatccagcctccttggcctcccaaagtgctgggattacaggcgtgagccaccacacccggcctcaagaataaaattagccatattttcctgtctgatagaagatggagcacctcttacgcttccacttggctgtggattgtgaattcactagccgattattttgcttctctaggcattaagcagtcaactcttcatttttaaatgctagaggcagagatcatccaggtagatggataagccttaaaccatttggatttaagacagatatacatacagacagacactcaaatgctactgattcccaaactttgcaaagttacgaaaagttatttattttggcaacactttccccagcaataattctatatagcatatagttatatgttaatggagttgtctgtcagtttctgagcccaggctgtagtgcagtagcatgatggcatgatctcagctcactgcagccccgacctcctgggctcaagtgatcttcccacctcagcctccctccaagtagctgggaccacaggcatgtgccagcatgcttagatgtatataccacaggcatgtgccagcatgcttagctatatatatatatatatatatatatatatatatatatatatatatatatatatatatatnantgttnttttnnttttttttggagagacagggtttcaccatgttgcccaggctgttcttgaactcctgggctcaagcaatccacctgccttggcctcctaaagtactgggattgtaggtgtgatccaccacacccagctctgagaacttttttgatcatttcttggcacatcctaaagctaattggatagccatgaatgctataattgggtctgtgagtgccacaaacccaggcctggaaaccactgatctccacattaaatggcagaatcatgaacaggccgcatgcagttttcagctaagtcaaaattctgtcacttatcaactaactgtggagacagcacaaggataactggtttcacttaaacaacgcacatagtcctgaaagcataggtgcactgatagtattcatccatccaactggagtcattttctgacctgcttacatcagtacatttctagacacagcttcctttgcacatgccgcccccaccaattacacgcatccctctcaaagacccatgcatctgagctacttagacttaaatatatccctcctgccttccccatggaatccagctgcaaaactgtccagtaagcagttgctaatgtaaagcagtggcctgaactccaactgcacattagaatcatctggggagcttctgaaagtccctctgtccagccaaatttgagaaccactcatctgacctaacttcctgtgtttaattaagttgacttcacagtttttaagttaaatcatctctaacttagtccttaggctgttcttgtttgtgttgcctttttgtggctttgtaagtaaaatccaccctctctatccgtgggttctacatctgtgggttcaaccaactgcagattgaaagaattgaaaaagaaaagatgatttcgtctgtattgaacctgcataaactttttttcctgtgattattccctgaacaatacagaataactactaattacatagcatttacattgtattagatattacaagtaatgtagagataaagtatacaagagtatgtatgtaggctaaatggaaatactacattttatatcagagacttgagcatttgtggattcgggtatctgcagggcatcctggacccaattctcagtggatgctgagggatgactcgttagtcgcctgtctgtcccttgagctcctgcttctctggatgaagatgctaaacgttcaagacatcctagccaatccacaaaaaaaggttgtaccctgatatggcttgaaacaaccaaattcagtagtaccaagagtatagggggctaaagcaaaatcatagaagaagtcctgtatctctaggatttggggattatatagtagaagccaaaaagcagctctgataattcaacatacattgaagacatacaactcccttaagagaaagcaaaccatggctctgcatcttggttcatcatgaataattgcatatcattttgtacacgagtgtcagttatcagcaaagccatctgggacctttggccaaactttactttgcagtaggacactttgcaaccaagatatcaccccaaatatgtactggtataagagggaggtatgagatccttttaaatgatgcatggaagaacatcttttatttaataattatttatttatttgaatatatttgaaaatatacgtggcacaaaaaaccataattttacagtgcagatagtattgttctgtccacagtttagaaatgcacccatttaaagaagagtttctcactctttaactagatatgaacaaaaacaataaaggataaagaaaagtttcagtagataatggtacacaactgatagacctatatggaaaggaaaaaagacaaaagtgtgataacactatattttaactctgtgacaactgtggccaacttaaaattaaatattcttcctgcctccccaattaattttgtagggagaagggggaaaataaaatgtaaaagaagttattcagtctttaagtaagatgtggaggatcccaggaaatgacccccagggtgaagagctattatttcagccaggttgagattcagtaagtgcaaggacacttagtccagaggcaatgtcatatttacntntnggatgtaagcctgcagcatctgtggcaggcatgttagaaggctcagtctagaaaagtcagtgcaagctccccgtatgtgtctgttgggaagtgaactctgtctcacatagcagcatgcccactctctgccgagtatgcagttgaaactgcagagttccctgatccccttcacaggatgtgcaacaggggtgtggcatgcctgcttggtcaccaccactgctcaaacccctgatgagagggggagcacgcagataggcaggtacaggaaccagggcgagtcttttgggctccagccctgcggtagtatctaggggcgggtgccgacggccccagtgttacaatgctcttttagccttgccgtctgcagacagcttgttaaccagttcaatggaccctctgccttttgacaagggtagagggccaatatgacagctttccgtattccaagctcttgcctagctcttggaagaatcaggtcacacacgggcttgaaggatgaatgcagggttttactgagtgttggaggtggctctcagtgggacggatggggagccagaagcagggatggagtgggaagatgatcttccccagtttggccgctggatggccacactcctctctgacccctagccaagctcctctcagtgttcagacgttcctcttctgtctttctctgccaccttgttccaccattcgtcagcttgtctcctcatctccttgtctgcttccggagcctgagtttcagggtttatatgggcacaggataggtggcatggcaggccaaaaacaacttttggggtgcaaaaacaggaatccctgtccccatttagggctgtagattcccgggcttgagggtgaggcctttgccaggaaactaccttcttctacccagggtttccctgtcttctgtccatatcacaatgttcttagaaggataagaaaagacacaaaagaaagcctgacaagtttgctaatgtctggggtatatgagagttggctcgccccatgatgggctccaattaaattcatctctgtcttcctcatgtgccattcttccctggctcacattagaaattcaggagcggagaacaaagcagccaagtttgtttttccagagcaagaggggtctggtgaaagcagtcctgacagctgcaccgtgtgtcttggtgaactaacggcttttacgtgtttcattcaagactgtttagtctgcgtgctaaggattcatatatcagtttttggctctagtgacattgaggtagtttgatttccaatgatttcgttgtcatctgtatttgcctacagtgaaagaaataactgagagtcgagttagtgcagggtcacttaaaagcttgcctttcttcattcactctccttaatgatattgccagtgcttctaaaaaaaagaaaaaagaaaaaaactaaggcagcagctcttaataaataacacctggagcagaatcggtaaactgctttcacgttggcttttgcagaagtggcaatgcattgaggatacatctggcaagcttcgaattcacaagtgtaaaggacccagtgacctgctcacagtccggcagagcacgcggaacctctacgctcgcggcttccatgacaaagacaaagagtgcagttgtagggagtctggttaccgtgccagcagaagccaaagaaagagtcaacggcaattcttgagaaaccaggggactccaagtaagccacgcttttgtgaccatctcaatggtggcctaggcctgtgggaataaacaatagagagacgaaagggttgctccttctacattttagatattatcaatgcatcattttcaggctaaaagcacatcattgctctatttaaaataagaaagctaagactaatgtgacattttgctttgtaaacattttcacttaagcatagaatgaaaatatagttcataaaagcaccagatgcaaaacatatgcacacataaaagagtttataaaatggttattccaaaaggtaaaggatatggtttaagtccattttattttatcgtaatgccaacatctcctgacttgtctgcctgaagttgcttttaaaaaatagtaaatacaaggtttcagtgtgtatgcatttaattttaagaggaaaagcataaacacttttttaaggcatatattttaatctctgttttaggacaatatatgtatgttttaattctgtcaaatcattggatctcgttgattggcagggacaaactagttgcattcagtatgaaaaatacttcctagaattttcttaatagctataagaaacctacgattatataaatgtgaaaatccacgggctgacaccctccacgaaagaatgaatctagtaccacctagtggagtaacatggaaaatgactcaattttatggtgatttctttctatactggtttggaaagaagcaatttaagtaaattaaattctatgtcaaagatttggaaatcaaatcatacactagaacaatggaagccctgagaacaggcatttttattgtagactccacaatatgggcttcagggccatgccctgatatttcatccaaaattgttgtgttttccatgtgtatatggacatttgtttccatgtcaacaatttttaacaaattttaaaggaatccgtaagccaaaatactaagaatctttgatttgggagactttttttcttccctaacagaaaaattccaggtctaataactcacacaaagatatcaaatttctgaaaatcaataaggccaggcgcggtgactcacatctgtaatcccatcactttgggaggctgaggcaggcagatcatttgaggtcaggggttccagaccagcctgaccaaactggtgaaacgccatctctactaaaattacaaaaaaaattagctgggcatggtggcacacgcctgtaatgccagctacttctcggaaagctgaggcaggagaattgcttgaacctgagatgcagaggtggcagtgagccgagatcgcaccactgcactccagcctggatgacagagcaagactccgtctcaaaaaaaaaaaaaattaataagggacgaggaccccagcatgctcttttttcagaagctgattagcaacattcagtttagaagtaggagtgccctcttctcttccagaaagttcgaccttgtttcccaggcactgggcataaggcacattgatttttcagtattaggcacaaacacaagtctagggcagctctctcaaactgtatggaatcttgtgtatttgagagcaggagtcggttttcaccctttctgcaaggatggaactcgtaagcactcttattgacacccctactgtcacggaggttgctccctgatctggaaactgcaggattcagctgagaggtgtctcagaagcatgacaattctgattccacagccagtatgccccacttctttctatgttagcagcaggctagagcgataaggccagacgaatatgcctctacagagctaagagcatctagtgtttgtgcattaaagttcttatctggtacacatgagttcttgaaaaggttccatagtcaccagaaagcatgctgccctctccccatccctgcccgcccaccccttgccttaaccctcctctgccaggtataaaagtgagttggctgatgaaagcattaacaaaatttaattcttcttagagtaatcctctactatttgtacaaatagaagttgtctagagcatttgcctctttgaaaaagcagcccaatgtagtggtaagacttcatagtctcagaagattatagtcctagctccataaccttgcaaaatgtatgtgacattcaaaacttcagttttctcgtccataaaataaggatgaaccggtattgacaatctgatgtttttgtatgtaagggtttttataataatacctgtctttcaagactccagattagagataaatatgaagtatataatacatagcaaaagctcaataaaggatagtcattattattaacaccataattgggaatatggttttatccaaaaaaatagcctgagcagttcacattgaaaaccaaatgtagaagttcacagcctgccatgaataaaaaggatcctagaaatcacctggactaaccccctcacttgacggatgaagggctggaggcccagagaagtgtgtcatccatcacactgccaggcaatggcactgccaggcaatggcactgccaggcaatggcactgccaggacaacctctgctaccgtgaattgcaggcaccacgatgccactcagcaatgcagcatggactgctttctccactccaggatcccttctggaccaggtgatcactttcttcccttgtaagctacatcaggacatccatagtaatgtatcttcccttacttctagagtacaagcccagatttgtccatactcggcagacacgttccttgtccgtcgaatttgaaggtgaaatatatgacataaatctggaagaagaagaagaattgcaagtgttgcaaccaagaaacattgctaagcgtcatgatgaaggccacaaggggccaagagatctccaggcttccagtggtggcaacaggggcaggatgctggcagatagcagcaacgccgtgggcccacctaccactgtccgagtgacacacaagtaagaaagctttatttgttcactagggttgagttcagaattaccaccacaacacaccatattatcaccattttgcacttggcaaaaaagcagtatcacttggcaatacagtgcctgagggctggcctatgtagcaactgggggttaaagaaacaatgagtccacgcaatcataggcttggacacatgctttgggtttgatttcacattaagactgatcagctaggaatccagccagagtaattcacattaaggctgatcagctaggaatccagccggagtaattccgtcacatcttgacttagcaggcatggagttcatgagcctaagcagttaccttcgcaggcatctagaaaacagatggaaacaatttcagaggctggaagttcttccatgttacacaatcactgtcacttggagcagttgtgtagtcacagactcagaaacgaaacacagtccaagggaggacagtgagtcccagagacgcttccagagagatgatgtaggttacaaatggatgtaagacatacaaacatctaaccagtcccggatcacagagagggccctggaagtcaaggggacagggaaggcagatgattccctcataagtttaatgaactcactttgttctttggctccatccaaagtctacttactctcttgattaggaaatgttttctttctgaatttattagcaagatctttgttttctctccctaattgtatcactttgaggagatgggacactgtgtgctctgccaggatttttatctctgaggctctggtctcctggtgcctgaagttgatgcagttatatactaaggggtttagaccagaatgcatttctcttacattattaaccccacatcccacctactgtctatccctggggctgtttgtttacttcaaaactcagtggggtacttaaggcactctctttttaacaaaatgagtggaatgaattccccttctgaatctgcttttcttcaaacaagccatttgcattatgatgtgaaaggtcccttttgttctatgtctatttgaacttgagttttttggtggtatcctgttcatgagggtgtgagcattgaaaactgccttgaaaagtggttgtagggatgatcttagtcacagagctgtgacaccatccacccatgtgacattttgtcctcactggtggctagaacctattgtgtccagaattggtgggttcttggtctcactgacttcaagaatgaggctgcggaccctcgtggtgagtgttacagctcttaaggtggcgcatctggagtctgtcccttctgatgttcagatgtgttcggagtttcttccttctggtgggttcgtggtctcgctggctcagcagtgaagctgcagaccttcgcgtgagtgttacagctcttaaggcagcgcgtctggagttgttcgttcctcccagtgggctcgtggtctcgctgggctcaggagtgaagctacagatcttcgcggtgagtgttacagctcataaaagcggcgtggacccaaagagtgagcagtagcaagatttattgcaaagagcgaaagaacggagcttccacagtgtggaaggggacccaggcagattgccactgctggctccggcagcctgcttttattctcttatctggccccacccacatcctgctgattggtagagcggagtggcctgttttgacagggtgctgattggtgcatttacaatccctgagctagatacaaaggttctccacttccccatcagattagttagttacagagttttgacacacaggttctccaaggccccaccagagcagctagatacagagtgtcgattggtgcattcgcaaaccttgagctaaacacagggtgctgattggtgtgtttacaaaccttgagctagatacagtgtcaaatggtgtattcacaatccctgagctagacataaaggttctccaaggccccaccagagcagctagatacagtgtcgattggtgcagtcacaaaccttgaactaaacacagggtgctgattggtgtgtttacaatccctgagctagacataaaggttctccgaggccccaccagagcagctacatacagagtgtcaattggtgcactcacaaaccttgagctaaacacaggatgctgattggtgtgtttacaatccctgagctagacataaagactccacgtccccaccagactcaggagcccagctggcttcacttagtggatcccgcacaggggctgcaggtggagccgtctgccagtcccgcgccatgcgctcgcactcctcagcccttgggtggtcgatgggactgggagccatagagcagggggtggtgctcgtcggggaggctcgggctgcacaggagcccatggagtgggtgggaggctcaggcatggcgggctgcagtcccgaggcctgccctgcgggaaggcagctaaggcccggtgagaaatcgagcgcagcgccggtgggctggtactgctggtacctccgcagccgctggcccgggtgctaagcccctcactgcccggggccgcaagggccggccggcctctgcgagtgtggggccagccaagcccacgcccatccggaactccagctggcccgcaagcaccgcaggcagccccggttcccattcgcgcctctccctccacacctccctgcaagctgagggagccggcactggccttggccagctcagaaaggggctcccacagtgcagcagcgggccngaagggctcctcaagtgccgccaaagtgggagcctacgcagaggaggcgcggagagcgagcgagggctgtgaggactgccagcacgctgtcacgactgccagcacgctgtcacctctcaatattcccattgatgctggtcttggatcagctcaacggttactgcatgtatcaacattaaggattttgaggattaaaatttctctttgttatctttagtgttttctgctattagaatataaacctatttcacatggttttggtttgttttgcaggtgttttattcttcccaatgactctatccattgtgagagagaactgtaccaatcggccagagcgtggaaggaccataaggcatacattgacaaagaggttagccatggctatgtgactgtcagatatattccaaactcaaactcggcctgccagccctgctgtgtctggtgggacataccacagatacacatcatctataattatgtgaaaaaatacaaaaaaaaaaagttatttgtctttctccagtgatttaatgatagtcctactgaaaacaatatagagtatgagaagagactgggaactgactcaatggtcttttgaaatctctgtgagaaaatgattcagttataaaagaggaatctgctaatgtttatctataacacatgggttggaatatagagtctatatagacatattctatgcccagtttgtttctatgttaagtatcatctcagatgaatagctgttattacagaacagagaaaacaaggtgaaaagaaaagtactttgtaaagaaaatcctgatcttaatacgtaagtgcttgaaaacatgttttccagattgaagctctgcaagataaaattaagaatttaagagaagtgagaggacatctgaagagaaggaagcctgaggaatgtagctgcagtaaacaaaggtgagcttgtttccatccatgctccactttccaaattcatttccgcacaagccagaggcattagcactgggctcatttttctctcttacctatagaatgtattgtcatagagtacgataacctaagctatttaagtaaaactaaatatgcttaaacttaagcagaaagtaaaaagtcacattcagctaaaatacttacaacatcactgccttccttctttctattttgctttctttttataaaatgaacactttgatccaatgcaaggctatgaagtctcactttttaatcttctctcctgcagctattacaataaagagaaaggtgtaaaaaagcaagagaaattaaagagccatcttcacccattcaagtaagtaactctctgttttccacatttgctgggagtcaatgactgtccacctggcccttcgaagaggctggagggacccctgtgtttcctgcagtgccgcttcagaagaagtagatccatctaggagggcacctagctcatgaagttgaaagcaaagccccacctcaccaagggaccgtggcaatgctcttggcatcctttgttggggaggcttgctgaactccactgtcattctgtgggtgctccctacctggcagatgggaccagtaactagattttactccatgcactgctttctgtggagagtgcttgagggttacagactctctcgatgcagttggtgttctacagagcagcctggaatagtgctgaattctgaaagtgggaagaaatataaatttttttaaataatagcaaaatttgcatgtgaaggagatttagtatttaaacttcaacaaagtttaagccttttatatataaaaaacaaaataataaaaaataattctaaaaaataaaggctatctaaacttgtttagtagaatttgtcaaagaattttttaaactttttaatccaagccatctgattcaactaacctttaactcgatggctgattggtactcggctgccaaaaaaatgagccatttgtccaaagagtgtggctagcaggatcctgtcattcacattaacatttatttccatcgatgtttccatgcacatgaggaggaaaatgttggtcctcttaggttcaataaggtcccaagaaagctgtcactgaatgcatttgcattcagtgttccttttttgttgttttttcgagacagagtctcactcttttgcccaggctttagtgcggtggtgcaatcttggctaactacaacctccacctcctgggttcaagagattcttgtgcctcatcctccctagtagctgggactacaggtgtgcgccaccacatccagctaatttttatatttttagcagagacagggtttcaccgtgttggccaaactgatctcaaactcgtgacctcaagtgatccgcccaccttagcctcccaaagtgctgggattacaggtgcaagtcactgtgcccagcctgccttcactattcctgattctattttaagtccctctatacaaaatgaaggtcgtccattatctcttatcaaggcatctaaatatttgtgcaagactcacagcaacaagcctatttgtaattgagaaagtgccttctgaacactcaaaataatcccttctcttggaacagggaggctgctcaggaagtagatagcaaactgcaacttttcaaggagaacaaccgtaggaggaagaaggagaggaaggagaagagacggcagaggaagggggaagagtgcagcctgcctggcctcacttgcttcacgcatgacaacaaccactggcagacagccccgttctggaaccgtaagttgcttgttccaaatgccacttcctgccgccatgcagagacagcgactcataacttagatcagaaattcagcataaaatgaggaatctacaaagattcaagagaaaggcatcatattctactctatactggaaactcaaatgattttgccatgtattactgttttctttaaattttttctggcattttgtttggtaatgccaagcttctccctggctttttcctcctgatgatgttgtttcacataatacccagcacctggcacagtttttacccagtagaactgttctatagctaaataacgcaagggatgaacatcccgtaaatggatgaacaattttgccccaaatagattttgtttctgctttatttcaagtacataagtgtaataaaaggaagaaaaagaatggtaaaagcctcttaaatgcagggcccatactctacttattctcagtccacttcagtaccagcactagacttgtagaataatagatactctacaaaattatttggttttacattgaactgctaaggatatggcataataacatttgtgcacttttaaaatagtgcttatattttctttagtggcctgtgcacattattcactgaggccatatagaagtaataccccacattcttatagtacatcctctgattgaagcttaccagcctatagagtagatgaaacacaaaatcttctaactgagaagctcactggagaccacccgggctactgtttctcaaactgggatttggagactccaaagaattgatagaccattcttggggggatctagggcttgtcctaggagactttatgttttccctttccattttgatgtctcttgatttcagggtccatgtttgcatttctgtttaaaatcacatcgaggccgaatgaactcttaaagtcacagcatttaacttttaatctagtttctgaaactgtggtgtgggaatccctgagggttattcagatcgctggggacagtaactggggacgcaacatctagcaagacactttattttctgtgctcatattttaatggggtacaggtagaaaaaaaagaaagtaaatgaaacaaaataattatgagttgtagtaatgctatgaaggaaacagtgatcaacattgttttttattattatactttaagttttagggtacatgtgcacaacgtgcaggtttgttacgtatgtatacatgtgccatgctggtgtgctgcacccattaactcgtcatttagtattaggtatatctcctaatgctatccctcccccctgcccccaccctgcaacagtccccggtgtgtgatgttcctcttcctgtgtcaacatttttaaatgggactctttcggagagcgtggggaagacgggtctttgaggtgaaatttaggctgaaacctaaaggatagagagaagcgatccctgtgggagggagcgtgttccaggcagagggaacagtgcaagcagaggtcctgagggagtctcacctttggtttatccaggagtggaagctccttgaaagctgaagcattgcaaaacacagggttatagttgcttatggcagaaggaggcccttcatacctcntatctgctttttatcatctgnagttgaggccatcctgctcaagccaccaccatttcttacctcggccactgccagacctcnctctgtggcctcccaggctcccctctggtcctcaccagtccatcctgctcagaggagctagggtgatcttttaaggacacctgcttttcttaagctaaagagcagaatcccttcacctgaccccagaaggctgaggcttcagtgagctgtgatcgtgccctcacactccagcctgggcgatagagtgagacgctgtctcaaaaataaaataaaatatagcaaaatccttaacatatccaacaaaaccccatatgctcctatccaatcttacactgggaccattgcctcctgttcttgcctgcttcagccactcaacttctctttattccacaagcatctcaagctccctctcgccatggggcctttgcacttgtttcccctccctggaaggctcttgcccacagccccgtgcccagaaaacactactcacccttcagacctcaattgcggtgtcactgctcgtggacaccctctctgtgcctcagactagggtccgcccatttgatacgctctatcagcaagctctgtttttcccccatgggacgtatcacatttgtaatcatagtttttttgactactgtttttgcttaactgttgtcctttccactagactgtgagtttctcaagataaaaaaccatgtctctatgatactgtattcctgacccaaaggaattgcttagtcaattttaggtgaataaataaacaaacaagcaagccaccctgtccagatcaaatcaactcatgtcaatttaacaaagctttgagtgcctgccactgggtgtcactgtgctggtgagtgaggaacgtgcctgccatcactctgctcttgtacacaggagcgaattaggaactgatcccattcaataccaaatttgatgctccttctgatacacaatgtattcttggtgctctggtattctaggacagtggcttccagaattttttcccaaaaagccacagtaaaaaaatgcaccttatatcaggatcctgtacacatatgtgcacatacacaagtatatatgtgtatctgtgtgtatatgtaatatatatactaaagtaaaaatttcaaaaaagtaatactatgtgtgctatgcttaaatatttttatccattttctattacatattttaataatattattgctgtattcctcatatttgctatgtcaacttaagcccttggcacagtgagactcaataacatgaaaaaaagaagaagaaaagaaaagtcaaatccacccaggcacaagatcctccaatgcaatggtctctaaacatttttttattatgtacccatatcaatttttaaaataaacacaccgtctatatttcattacactaatatacaaacatgcctgtgtattatgaaaatatacaaaataaaaaggccaagaacagcaattcatgcctgtaaacccagcactttgggaggccaaggtcagaggatcagctgagcccaggagttcaagaccagcctgagcaacatggtgaaaccttgtctctacaaaaaaatacaaaaattagccgggcnttnggtggtgcccgcctgtagtcccagctactcgggaggctgaggtgggagaatcacttgagcatgggaggtgaaggctgcagtgagccatgattgtactccagcctgggtgacagagtgagaccgcatgtcagaagaaaaaaaaaaaagaaaagaaagaaaaagaaaatacacaaaatagaaatgtaaagtttgagataaacgtttaaaaaagagtttttaaaaatagttttcatattctttggaggtccaaaacattttgttctcacttattaaagaatgcttaaggaaaacaaatctcagtgtcccacttaacaatgcagtgagacattcagtttatgtttgatgtgtgatcttaattgctttcatatgaaacatgactcagaaagattttctggttccatagatgtgcttcacggcatgctgagtcaatcaggacattctttttttttttttttttgagatggagtttcgctcttgttgcccaggctggagtgcaatggtgcgttctcagctcactgcaacctccgcctcttgggttcaagtgattctcttgcctcagcctcccaagtagctgggattacaggcggccaccaccacgcctagctaatttttttgtatttttagtagagacagggtttccccatgttggccaggctgacctcacctgagatcacctgacctcaggtgatccacccgcctcggcctcccaaagtgctgggattacagatatgagccactgcacccggccaggacattcatttatttatttattttattatttttatttttattatattttaagttctgtggtgcatttgcagaacgtgcagttttgttacataggaatacacgtgccatggtggtttgctgcacccatcaacccgtcatctacgttaggtattttttaatgccaccattaactaggcagtcatctctattgaaattacacttttaaatgtctgtcctccctgagattgatcaattattcttgcaaatacaaaggtattgtatttgtatatttcatgaaacaagtttaaaacccatttaaacggttaatttggaagatttctacacagattagaaaatttgggttccgtggtttttaatgtatgtagatgtgagataaatgttcacatataaataatatgttataaataacataattagagatcttttaatgaaaagtcgtataatgatgaaagcattttcaatcatccatttttaagatattatcttttcttcacctgtatttgatctaatctggttcattcaattcaatttaggattttttccccacagctaccccttcatatcgtttcctataagctttaggtctttctttgaaataagcatatgtagtttgttatctgatttgttaatatcaaatctcaagtattaaggctttttaatgttttgatataatttagaagttctttagaatagatggttttcattaggtgacattcctagaattattgtcataagttattataaatgtggtaacatattttacttaaagggtgcacatctattacaaagactgtttgcgttaaataaaaggtcagaaaggatatgaaaagtttaagagcgtaaaagttggctgggcacagtgactcacacctgtaatcccagcactttgggaagccgaggcaggtggatcgcttgagcccaggagttcaagaccagcctgggcaacatggtgaaaccctatctctaccaaaaaaatatgaaaattatccgggcttgcctgtagtcccagctacttgggaggctgaggtgggagagtcacttgagccccagtggaggaggctgcagatcacaccactgggcgacagagtgagaccctgtctcaaagaaaaaaaaagagagagaggcggagagaataaaagttttaagttggagaacataatgtgtaaaaaaaaatttttttctttttgagatggagtttcactcttgacccccaggctggagtgcaatggtgcgatcttggctcactgcaacctccgcctcccgggttcaagtgattctcctgcctcagctgggattacaggcgcctgccaccatgcctggttaatttttgtatttttagtagagaaggggtttcgccatgttggccaggantggtctcaaactcctgaactcaggtgatccgcccactgcagcatctcaaagtgctgggattataggcgtgagccaccngcacctgaccgtgtaaaaatatttaaattagctaatcaactaaaaacaaaatcattcctggagggagagagggttgaataggcagaacacaggatttttagagcagtgaaactactctatgtgatacaacaatggcagataaatgtcatcatgcattgtccaaacccagaggatgtgcaacaccaagagtaaacacaaatgtaaactatgaactttgagtgacaatgatgtctcaatataggctcattgattgtaacaaatgtgccaccctggtgagggatgtctatggtgagagaggttatgtatctgtggggactggggttataaataagaatgctctgtacttttccctcaaaaccgctctaaaaaatagtctattaaaataattttttaaaatcatttctcattcattgtttaaaacatctcttttagcctaaggggacagatttagtgtgtctgatactacataggatagcagagtctagtaattaagagtaaactcttgcccgggtgtggtggctcacgcctgtaagcccaacactttgagagaccgaggcaggcagatcgcttgagtgtcggagttcgagaccagcctaggcaacatgccaagaccaatctctacaaaaaataaaatattagccgggtgtgatggtgcatacctgtagtcccagcaccacaggcggctgaactgacaggatcacttgagcctgggaggtcaaagctgcagtgagccttaatcatgccactgcactcgagcttgggcaacagagcaagaaactgtctcaaaaaaaaaaaaaagtaaactctgtagccagatcccagtgctaccagttgtcagccaggtgaccttggacaaattacttaacatctccttgcctcaggtttttccatctgttaacatgaggatgataataataacctctgtctcaagaggtagctttggggattaaatgagttaaagtacatagtgcacaaggaatgctcattacgtgtacctatcctattaggttggtgcaaaagcaattgcagtttcagaccgtgaattttaaatcattataactgggctcaaacacatctttctcaatcaaaataggaaccattacacccaacgcattttcgccacgagaaataagtttgtttattcctgtagcataaaaattcatgtttcagaccgggcgcggtggctcacacctgtaatcccaacactttgggaggccgagatgggcagatcacgaggtcaggagatcaagaccatcctggctaacacggtgaaaccccgtctctactaaaaatacaaaaaaattaactgggggtggtggcgggcgcctgtagtcccagctacttgggaggctgaggaaggagaacggtgtgaacccaggaggcggagcttgcagtgagccgagatcgctccactgcactccagcctgggcgacagagcgatactccatctcaagaaaaaaaaaaaaattgtgcttcaggattcaatgaactcttggaaagcattttctacgttctgctggttgtggaagtgttttccctacagaaagttgtcgagatgcttgaagaagtggtagtcgattggcgagaggtcaggtgaatacagcagatgaggcaaaacttcgtagcccaatttgttcaacttttgaagcgttggttgtgtgacattcagtcaggcactgtcgtggagaagaattgggccctttctgttgaccgatgccggctgcagacattgcagtttttgatgcatctcattgatttgccgaacatacttctcagatgtactggtttggccaggattcagaaagctgtagtggatcaaaccagcagcaggccaccaaagagtgaccgtgaccttttttggtgtgaatttggctttgggaagtgctttagagcttcttcttgttccagccactgagctgttcatcgcacgtcacaatctgattaagaaatggttcgttgttgttgcatagaataagagaagacaacacttcaaaacgacaatattttttattttcctctcagctcataaggcacccacttaccgagctttttcacctttctgatttgtttcaaatgccaaatgaccatagaagggtcgacgttgagttcttccacaaattctcatgtagctgtaagaggatcagcttcaatgattgctctcaaggtcattgtcaacttccaatggtccaccactacactcctcatcttcagggctttcatctcctttgcaaaacttgttgaaccaccactccactgtatgttcgttagcagttcctgggccaaatgctttgttaatgttgcgagttgtctccgctgctttacgatccattttgaactcaaataagaaaatcactcgaatttagtttttgtctaacaccatttccatagtctaaaataaacatgaagagcaagtaatacattattagcaaaaaaataaagcaagaaatgcccattaaaatgatgattaatataaccacatttattgaagaatgtattccaatatcaaacagcaaatttcaacaatgcaaaaaccgtaattacgtttgcaccaacctaatagttgtttctaaaaaaattttgctgggccaggcacagtggtgcatgcctgtagtcccagctacttgggaagctgaggatcacttgagcccaggagttctagtccagcctgggtaacatagagagaccccatctcttaaaaaatacttgttaggcagcacatttctgaaattcaagaaaggtcagcaaatttggaacatgtgcccttttgtaaacagaagagtagatgagttgattataaatgggacatctcttctgcatacattctacaagttaaccagagggctatgtggtataaaagatgtttgtggtcacagcctagctcaggctagagtgttgcagagaccatcccaaatcctccaggctgggctcaaggcttctctaaacccttctttgttgcaaaatcccatcttttcatgcttcattggtgacatgtggccatctgccacatagaacaagtgagagtactagttccatatctttattaaataaccatttttcttttgtacaaagaataaatagaaattctgatatttttcttctcatacttccgtcactcacccctctttggaaaccactgcataacagagctaaggggaggataaactaatgtgcctgaaattttactttagtcttcagcctataagagatcactatcttttttcccattttcacctagtttcacagcaaatttacctacggggggaaaggtattattattcttaacatgaaaccacaatatttataagaaagaaattgtgaactttaaagtgtaaagataagggaacactggaatggcaagcctgcctaaggtttttcactctttttgttttgttgtgtttttcttttttacccaacagtgggatctttctgtgcttgcacgagttctaacaataacacctactggtgtttgcgtacagttaatgagacgcataattttcttttctgtgagtttgctactggctttttggagtattttgatatgaatacagatccttatcaggtaagacaatatatgttcattttatgaaggttgttgaaaataggataaccagacataagcttaaatagattgtcctgtctgcattcacagctcacaaatacagtgcacacggtagaacgaggcattttgaatcagctacacgtacaactaatggagctcagaagctgtcaaggatataagcagtgcaacccaagacctaagaatcttgatgttggtaaggaaaaaaatactattttttctattttacctggaaaattctttgtgttactgagctttctgccttggaaacatttaattgcacagaaacatataattcaagatacttagaggagacactttccaggcaattctaaatacaatttgatctctaagtttagctctggtgtactaatgaaaagcttaatccaccaaaagatttggtgagcatttccttccaatatctcccacaggtctattctattagtaaaccttgattcctgatagaagcatctgttggaagatgacacgaaagcgttaggtatttgtttgttattgctgtcaacagtctgaagatatactctgagtaaaccaggatattctctttttttaagagaactttgatggaaagacacaatgctctatttctgctgtcccagtttggagttcccccagttggatccctgcctatgacactgaattagatttcttttgccagtatttttcgtctgaaactagagatattggagcagttcattaacttgggatctaaaaatataagaggatctgaatggaatcagccagatgttccttcccagctatgtgtgttaaactggcttatttctcctttgtttcatggagatgcagttcttttcagtgtccgccccagctcttttctggttaatgaaaatactcatttcctcctcatgatgtctgcagaaatgtaaataccagctgtccatacaaggaaggaggaagaactaaagctggcaagggcatggaccttggcatggcatgccaactccagaagggtgaagagctggactcacaggcacttgggtgcagtttgcaggagctttttgtggtgccgctgggttttctctgtgagtctggtgcagagccagtgtcatcaacagtaaaagtgggcagctttctgggtcacatgccttgaaaggggtagggattcccatcccagaatgatcaatatcaccacctgtcatctcctttccactgcagggtcacaaaggcttttgagttctgggagtcccctaagaaaatataaatcctcagttctcaatcaacacctctcaattaacacttagtggaatcagttgtcagtcaagagcagactgtacttgcaaaataggtcttttggtcactgaccccactcggctcaaatcttttcaaatatcctgcttatctgttgaccttttcctcaaatcttacaaaaaaaagagagagagagagggagggagggagagagagagagaggaaggaagaaaggaaggaagaaggaaggaaggaaggaaagaaagaaagaaaaaaagaaagaaagaaagagaaaagaaagaaagagagagagagagaaagagcctgcaaagacttggaatctcaaccaaccattagaggcactagaaatattatacccagatatttctccccaaaagaacataggacttttattggtggtgacataacaactctacttagtgaaatctgatcgagtcccttaatggtgaaatgacacactgggtggagccagttatgctgtttcacttcaagccgtcctctccaccttccagactattcctatgggagatgattattagcccgtttttttccaatgttttgtctaaaaataaccaaaatttaacttttcctgagaattacatggacttctggaagtacttttcccactgcttttaagtgggctctcctccctttaacacccacccatttttttcatatgaactcttatttttttttttatcttaaaccttttcattcatagctttcaatctgcattttgaacctaataggaaatctctgttgggcttcagcactgtctgtatttaacaccatgtgtttctttctaggatttagatgttgtgcatgaaaaactatatagtgaatggttttataagttctaaagctaacagaaattactcttgtattttcctatatcaggaaataaagatggaggaagctatgacctacacaggtattcacacttttttattcttctcaacagcttcttccccaataattgcatgatccagtggtttcaactaatttctgtttcttaccgtgttgcacagagcaaagctgggggtgcatgcttgttctaacagcattctccactatgttttgtcattgatcacagaactgtcattttgcttttaaatcagctcactgtcccatcaagatgttccagagcatttactcactcccatgcttgtttgcttgttggatgatgcttttaagcatggaatgatgtgaaggaaaaaaaacagaatggcctttgggagccccgggaaagggtgggagatttattttctttgtggtacttacacattgatttggtgggggagcttcatgaaaatgggttggagatttttattaaatatagcatcaaaggcacaaaatgactaatgagaattttaagagcactgtaaggccgaagttgaaggaaacaaggaatttctttgttgatgttcattcattaactttggtggtgaaaagcagcagccgtaagattctgaaagctctgcagagaggtggtgaataacgagaaggtgctgggagttggggacagagtaccgggagtcaagatactagtaaagggccacacacagtggctcacacctgtaatcctagcactatgggagcccaagcgggaggattgcttgagtccaggagtttgagactagcttgggcaacaaagtgagataaaaaaaaatttttaactagccaggtgtggtgatgcacacctgtagtcccagctactcagctactcaagaagctgaggcaggaggatcgcttgagcccaggaggttgaggctgcagtgagctatgatagtgacactgacctccagcctgagggacagagagagaccctgtctctaaaaataaataaataaataaaaaaataaagacactcaatagtgtcaacacagcaccaagacaacacacaaacattccataaacaaccctcagccctgtcattttatgcccctccaaccctcatccatccctcactgtgctctggaggggggacgcacgctcctgatggccgtgtcacttggtcacctggcaatattcgccattgctaattttctactctgagcacagacctcaggcaggtctgccacccgaagcagctgggcactgtccttaccgcctctgctgagacaaaactgaggcacagacgttaccagtaccctagttaatgtatccacttgggagaaaaacatccgtcaaagaaatgtgaacttaattggtgccatctatattaatatcttctttatctatattaatatcttctttatctatattaatatcttcttcatctgtattaatatctttaaaattaacatcccaaagaatgttgctgttcctggtaccctgttcggcccctctaacctccagagctatggtctcagatgcttccttttagagagaaggtcattagtccaccaagaagccaaatgacaacaggaaaggtgatgggaagatgaaaacaaaggaaggtggacttttgggtatatgttatagccatgtatgtatgtcttcttttttctattttctcttgttcttcatcttaactgtcctcaatctgccccacaccaaccctgtgtcactcccagcacacataagacagagcagaagaccccatccttgagctggtctcccctgggtatgggctgaggtaacatcccacacaccaggacgatcttccctgcctcccatcggtcacattaagacattttcaaagtgtaatattataaatggacctacctctaaatattgactttacagttattttatgaggcactcaatttatagctaagggtttttcagtctagtgtcatgaaagagataaaagggtgttcacagattatttaagacataaggctggtcagggatgagtcagagagtcattctccatgaagtcacccctggccaactttgaaaggaagaatgtttaactgcactttgggcgtaaatgacaagcatctgggaccctccccttccctgatccctgccaccaccactcaatcggccagataatcaattgtttctgaggtcactttcacataatcttggcaactttagttgttgaaagcatgcatgcaggggcaacatggtgttacctgttgctttttttttcccccttctaagctccttaccagagagcagatctaaggatactgtgtaacttgaaataaccggcattttcagactttgccatttcatagtccatagggcaagccatctttcagtggatatccacatggtgggcaggaaatcttgacattggtttctcagaaaatatctgcctagtcacacctgggaattcactaaacacccaaatgcagtgtttgatgtggccttacctgctccttgtatcttattggattgaatgagaacagatgcaaaacaagtatgtacagaaatgccaggaaaactactgtcttccaatggggttcaacagttcaaagccctccattgatggagccacttaggaggtttcagtgtcttaattcttttagattttgacagttttagaaaactaaaaaaaaaaaaaacaagtttttatcgtgaaatttgattacaaaagattttgagagaaatgataagaaccagatctgaagaatttgaaatttgaaaattcagcagagcatttttttaaatgtatcttgtacaagatgaactaaataaatgtttttaaactgacttctttttggtggatttcaaaagttaaccttcagacttatttagagggttttcataaagcaagtttttttctgttgctgctcaatttctttcttttcttttctatcttttcttttctcttccttttgctgttccctgtgtgtgaagcaggaggggcagctgaaatgctttgcatactcaccctggtcattttccagttaggacaagctcaaagggagagcacagctcagaaggtggcactcatgactcaggaaataatttgtggctcatttgaaagcagcatcttctaagtgtgttgcaaaatagagaaaaatcaacaggttgttggggtgtttattttccccactgcgtatgaaagctggtgctgctgccctttgatggccaagaggagctcctggcagccgtggccatgtgtcccgggggtgtgtggggcaggcggtcagttcttggcagccttcctctggcagggctgcttcctgatcctttgcttcaagccttctgggctgttagaccacacagagctccaccctcagcagccacgctgtaaccacattgctttcactgattttgactcatctcccccatagtgacagtgtgtgccaaaggtggctgtgggtgacacagccgtgtgttcgtgctgtacggcactgtggtcatgggggtggacgctggagctcctgattagtttgagttcaaatcccagcctcgctggtgggcatgcttagaacagaccctagcaggcgccaagccccagtaagtggtggagtcattggtaaaggataatgctgaatgcaggacatttatatggatgaaagagtatgggaaagggaatttcagtgatatgaattccaaagcgtgttagtatattttataagaaacaaaaaggtattcaccagcaccaccaaactccatcatcagtcacaggcaaccaagaattgatcactctcccagaactttgggaggccgaggcaggcagatcacgaggtcaggagatcgagaccatcctggctaacacggtgaaaccccgtctgtactaaaaatacaaaaaaaaaagaaaaattagccgggcatggtggcgggaggctgaggcaggagaatggcgtgaacccgggaggcggagcttgcagtgagccgagatcacgccactggactcctgcctgagtgacagagggagacgccgtctcaaaaaaaaaaaaaaaaaaaagaattgagcactcaagtccgtcttctaaactgcctgaacctcttgagatgagaagaacaaaacaaacctgcgctgtcctgatgtaggttaccctaatggagcttcctgggttctcctctccctgtcacatctcagggactccaccttattttaaagctgtcttactagcactgttggacttttctgtttcagatgctcaaacaagagatggagcaggggcagggtttggggttaaatgggctggaggtgagattggcccccctaaggtgttgaggacacttggggtgaaagtcgttagggtatatgtaggtcagagccagggccgctgcgtgcacagaggtgtgtcatggagcggccagtaggcaccaaaatccagccaaagctcggccatgagagctgggtagcggcaggggtgacaacagtggccaccctggtaaggttaaggtcagacttgggttagtctaagctgtcagagggtgttcatcatttttcttacctttccaatagtgaccctattccaaaggccttgtttcttgtgccagagaagaaactaaagtatagcacgtgcagaactccttaagatcctccccaggctgcggaatgaaatgtatctttaatcagttccaatatatagggggaaaatgtgccctcattcatccatgcaacatataaagacagaaagaatcgaaacaaccacctctgtgccaaacgccgccttcacagggagtgcagtctggtgttagaatgcacgatgcaaagtgccttgaccagaaatatatggcgtcataagagccaggagagggccccaacccaaccctgagaaatcaaaggaagctttccaaggagttggcatttatgccgcatcctgaaggcaacagtgcagtgatccagacacaggatggaaaaggaagtcagtccaaccagaaggcaagactcgtgtggggacttatcatcagttccgtgacagtgcaagggaaggagaagagaaggatgagctgaaaaggcaaccagggcctattttatggagtgtgttatatggagaatgatgatatgatgtatcttccaaacagggatgttttgaccatgggggaggagtactaaaaatagttaattatttatattaattattatttatattaattctatataaatattgttatgtatttgtttaccaatgaactagtcagtagatctataaaacagttgtatttaaaactattttctaagctaaaatgtcaaaaattctggacaaatgccaaaatgaacagggtaccagtacagcagatacaaactgggaccctcccaggcaaacgaaaaatgtggtcaccctagttacatgctacatcaaaggatgtaatccctgtcctaaaagcaataggcagacattcaagagtattaaactgggagaaataatatgagaggatttgggctgatcagattaggtggcataaatagttatgagaatagttttgtgagtcacattggtttgtgggtcagttctggctccatcacttcccaatttgaggaccagttgctaacagtattacaacacttactgtggtccagcgctcttctgaatgctttcgtatattaatgtatgtaaccctctcgataacttcgtgaggtcagtactattattatcctcatttttttttttttttttaagacggagtctcacactgtcgcctgggctggagggccgtggcaccatcttggctcactgcaacctccatctcccaggttcaagcaattctccttgcctcagcctcccanggtagctgggattacaggtgcctgccaccacacccagcttattatccccattttacagatgaggaaattaagccacagagtgactaaataactttcccaagattacacagctgataaatggtgaaattcaaacccagcgagtctggttctagctgtgctgttcatctctacactatactgattctcttggacaatttatttaacttcttttattatggctgaattttctcatctttaaaaaggtgataatacatacacataataatacacaaggatttcatgagatattacctgaaaagtaagccctgaattcatattattgtatgactgaagtttgataataaatttgattagtgagagacaaattgtatcaaagagccctggaattttttttttttttttttttttttgaggtggagtcttgctctgtcacccaggctggagtgcagtgacacaatcttggctcactgcaacctccacctcccaggttcaagcaattcccctgcctcagcctccctagtagctgggactacaggcacagaccaccatgcctggctaatttttgtatttttagtagagatggggtttcaccatgttcgtcaggctggtctcgaactcctgctcaagtgatcctcccacctcagcctcccaaagtgctgagattacaggtatgagccactgcgcctggctgagccctggaattttgaaggacatttatcttcacattaatggatgacaaaattgcagtttttaatgtcaatgctatattaataaagaggaaaagttatgtgcatttaccaataagtagatataatcagccattaaccacacacaaggtagtcatctataaatgacatatatatttatttctatttttagactatctttagggttgaacattaattggctttcatttgtaaaataaatagctattcctacaattcatccataaaattatgtaggttagaaatttatggtcttctggttgctctgcctgtggagtagccattttttattcctttgctttcttaataaacttcctttcaccttacaaaaaaaataaaaacggctaggcacagtggctcacacctgtaatcgcagcactttgggaggccaaggtgggcagatcacctcgttcgagaccagcctgaccaacatggagaaaccctgtctctactaaaaatacaaaattacccggacgtgggtggtgcatgcctgtaatcccagctactcgggaggctgagacaggagaatggcttgaacccaggaggcggnaggttgcaatgagccaagatcgcgccattgcactccagcctgggcaacaagagtgatactctgtctcaaaaaagaaagaaatttatggtatttttactatggccaattctattgtttggttgtcctgctnnnnnnnnnnnnnncnnnnncnnnnngctnnngnntnctnncnggncgcccnnnncngnncctgtgccttttccngccctcggtcccnnnnnnnnnnnnnnnnnnnnnnnnnnnnnnnnnnnnnnnnnnnnnnnnnnnnnnnnnnnnnnnnnnnnnnnnnnnnnnnnnnnnnnnnnnnnnnnnnnnngaaatcaataaggccgggggcggtgactcacatctgtaatcccatcacttgggaggntgaggcaggcagatcatttaaggtcaggggttccagaccagcctgaccaaattggtgaaacgccatctcttctaaaatacaaaananaattagctgggcatggtggccnnngccngggnnggcccnaaanattncagaccttgctttcgctgtgtatcttcgctttgttttggagttcaaacatattatgtttcaagtagcatgaaaatcacccaagatgaataccagtttggtccaaatattggaaaccctgtgccttcagaaaaaaaaaaaaaacaaagagctcagcaaaacatggaagggcttaggagaaaggagcagatgtattaacgcagatagtctgttcgggctcttcccattgtgaagtttaaattagtaccattagaaatgagacttggaagagaatagctatattaattaaaatatcctgccagatagcaacaagcaacaaactacatataatgctttatgatttttctgatcgacccattgcttgcttcttgaaactgtagacacctggcccggtgaaattcaatttgctactgagcacaggtacccagaatcaggtatagatgatgccataatggaggggttcacacaacccaggggaacggccagagaggctctgtggaggggatgagagctcctcttgaaggctgagagctgactgggctaatgaggcagggaagtacattctagaaataaatacaaacactgaggaaggagagagcctggtactttcaggacattgcacttgttcctgtggctggtacagaggtgatgtgccaaaggggaagagaagaggccacagaagctgcagaagtcagcctgtgtctgcagaaacaatcccttctgcttcttatgacaccatcagcacctgttaattataacactgctccaggtagagttaaaattccatgcatgcatgatctcttaaattacccgtctgtggaatatagcatgatgtaattctgtggttaagtttttaaaagtaagtaagtgtcatccagaaagaaatgtgacttggcttgcgacctgggtatgttcttgaatttgtcttaatggattcacggcttttctgtttccgggattggggaataattatctgtaatgtgaaatcatctacatttattctgaaaattcacctgtcagaacaagcctatctataccttttctctctgaataaacagcttccaaacgaccaaagaaaaaggtttccttttttgagctgaagacaggcagaaaccaggagacacatggaaaatttaagttctaatgtcgaataaatttaactttctattttgatataactttacatttacagaaaggtcgcaagaataatttcaagaactgttaccccatttgctttattgttttttcttgttctttcactcactttctccacacaccttttttttctgaatcatttgcaagtaatttgcaaacatcattcccctttatatataaatgctttaggaggtatttccgtagaacaaaaacattctcttacataactgttatgcatttatcaaaatcaagcaatttaacattgttacaaagcaattgtcaaatctacatttcatgttcaaatgttaacaattgtcccaataatgccatattcatcattttttgcttttctggcctgggatccaatccagaatcacacattgcaggaaactcacctctttttagagtattcttttatctggaacagttcctcaacttctcattatcagtcatgatattttaaagagtgcatgccagttattttgtaaaatgtccctctgttggggtttgtctgatgtttcatcaggattgaattgaagctgtggatttttgtcaggaataccacatattgtgctctcgggatatcttatcaggagctgcataacatcttggtggtattacctttgattacttggcaaaggtggagtttgctaggtgaagcccctataatttttttcttttttaattaataagtaattcatttaccagcttttaaggcattcacgattcatttttgcctgaatcatttgttgttaccatgatggttgcaaatgatggtttttccccctctgtaattcctcctgcttgctttttttttttttttttttttttttttttttttttttgtctgagacacggtcttgctctgtcacccaggctggagtacagtgttgcaatcttggcttactgcaggcttgaccccccaggctcaagggatcctgccacctcagcctcccaagtagctgggattacaggcgcatgccaccacactcagctaatttttaaaaatttattttgtagagacaaggtctcactatattgcccaggctagtctcaaactcctaggctcaagcgattctcccatctctcaacctcccgaattgctgggattacagtcatgaaccatcgtgcctggctcctcctgcatttcttaggtagtattgtactgtaaagaagagatttcccggccagatatggaggctcacacctgtaatcccagcactttggaaggctgaggtgggaggaatacgtgcttgagctcagaagttcaagaccggcctgagcagcatagcaagaccttatctctactaaaaatacaacattcaaaacattagctgggcttagtcccagcacctgttgtcccagttactcagaggcagagcttgcagtgagctgagatagcaccactacattccaacctggatgacagagccagaccctgtttcaaaaatatgaaagaagagattttcctcctctcctgcgtatttatttctatcagtatggacttagattctcagtttattccatggatattctcttgctatcattatttattttgatgattaaagtgtcttagattggccactggtgtccctgcacctggattccgtgtacttttgaagcatcctcatcattttttgaccacctcgttgctttctggcctaaaagcatgttccaggttcatatggcatttttgccactccacatttggaaacagccatttctccaaagggccccagttccttttaaaggggaatggcatttgaacaccaagatctgggtctgaggtgtataaaattgctgctgaggtgtcttggcatatagatccttttgatggatagagctaagagacacactggcatctatcaacatctattcttttttttcttttctttttttttttttttgagacagagttttgctctgtctcccaagctggagtgcagtggcatgatcttggctcactgtaacctccactttctgggttcaagccattcttcttcctcccctcccgagtagctgggattgcaggcacctgccaccatgcccagctaatttttgtatttttagtagagacagggtttcaccatgttggccaggctggtcttgaactcctgacctcaggtgatccgcccacctcagccttccagagtgctaggattacaggcatgagccaccgcgcccagcctcgacatctattgttgtacctacagatatgtagagatatgtctaattgagtgacctaatgcttccaatataatgttaccctgctcctgatttcaattaaaatgcttttagagtttctctattaaataagaggcaagctttaggactgagttatatatacttttatcatgttaaggaaatagccatcagttcttttttttagtgcttttatctttaatgaacgttgaatttgtcaaaaagctttttttagcatctatgaagatgctcagataattattctctttagatctattaaattattattgtgtattatattaatagatttggtaagaatgaatcctttcattcctgaaataaattccactgggtcattgtgtgttgctttcgtaatattgaattctgttcactaatattttatttaagatttttgtatcatatttttaaatgataccaatctgtgatttcctttttgtttttaccagcattatctcttagatatattagtttcttattactgctgtaataaattaccactgtgcctttaaaacaacacaaatttattctcttgtgtttctaggggtcagaaattcgaaatgaatcttactgggctgaaatcttctgggggctcgaggcaagaatgtccttgcttttccagtttctagaggctgcctgcattcctcattcatggtctcttctgccatcttcaaatacaaaaatgtagccaatcttcaaatcagtctctcccccaacccccaccttcctctgttttctggggtcacatctcgttctctacccctccttcctaccacctccctttccctttataaggactcttgagatcccactggccccacctggatgctccaggatactcccccaccccaatctcaggatccatgacttagtcacatttgcagagtccctttggccaggtaaaggaacttgtccatagtttccaggaatttggatgtggacatctttgccgggtggagtccactattctgcctatcacagctatcaatgttatccttgcttcgtgaaaagagtttggaagttttcttgagttatctgctctagaacagtctattagtattctcttttcattgaagatttgttaaacttctcctgtgaaagtccacagacctgatgcatctttgcacagtggttctttgggcttgctttttcttctatggaaactgttctatttaagctttctatctatattgggttgttaaatcaagtttagcctaaatctgcctcctcacatattttaagttcagcctaaaggtttctctgtatatcgtgaactataacctaaatagagttgtatacagactgtagcctactcttgtgcccatcactgagttttggcccttcaaaggtggccaactgctcaaactctgttcaaataaggcaaacactgagctgtaaccaatctggctgcttctgtacttcacttttgttttctgtccgtcgcttttctttttctgtccatacatcttcttccaccacgcagctgcgttggagtctctcagtctactctggcttgggaggctgccagatttgcaaatcgttctttgctcaattaaactctgttaaacttaattcagctgaggtttttcttttaacagcatcaatttcggcaaactattttcctgagcaactacgtttcatccaggttttcaaatttgttctcactgaggtctgcaaagtagtctcttgtttttattttttttttaagatggggtttccgtctgtcacccaggctggagtatagtagcaatcatggctcactgcagcctcagcctcctgggttccagtgatcctcccacctcagccttctgagtagctgggattacaggcgtgtgccaccacactcagctaatttttaaatttttattagaggtgagttcttgctatggtgcccaggctactgttaaactcctgggctcacgcaatcctcccatctcagcctcccagagtgctgggattacaggcatgagccacatctcttgtgtttttaattttgtgtatttcaacgatttttaaaatatttaccagtttattataaaggatattataagaaatgcaaataaatagccagacaaagaggtacataggctaaggtccagatgggtcccaaacgcagaagcttctgtccttgagttcgaagtgtgctaccttcacggcatgtggttgcattcaccagctggaaatttctctgaaccctgttatcgtttaagatttttaatgaggttccattacataagcatgattgattgcatcattggccattggtagttaactcaatctccaggcccctgtccactccacagaggtctgagagtcccaactctctaatcatgtggaggtctttctgatgatcagcccagctcccaacctagagctgtctagggtaccctagccatctcctcagcatataaaagacactcttatctccctggagattgcaagggcgttaggatctctgtgaactgggggtagaccaaatacatttttcttattatgccctagtcccctggccatgaaccccgtagtgagaagattataaaagtcaaaagatattggcacattcctagaattgcattcagccatcaataattagtccagtccatcattctgtcatatgaaaatacctcctagggcaaggccactcaggtttgccagcttctgttggatcttgccaggagtggcttagcaatatatgacctcacccttttaggagtctggtataatggagctaagagacaatgtcatctcctgttctgagcctttttcaagctgttaatgtaatattggatttctctcatgactcatgacgtaacccacttattcattccttcagcctcagttactattcctccatctctccatttatgaccaaagttttccaccttcggaagagacattagattcagccactgtgctgctctaggcttcaggcagcaatactagtctagtattatcactagactaccaataataggctagcaagtacctcttgctcagtctgctcccattcaaatagagtaagtttatataggtgcagaactaatgaactgtttttaaccaccaggcagtatacctgcattcactgttaaccccagttttgccagatggggtgaaggcacaacctgccctatcaggcccttaggaattctgacatcgttttaaagtataattagggttttttgcttaggaaacatccctgcttccaacaccagcagttgcatctctgcatcacgtataaaaaagaaagttgaagtgctgtgcagaagacttgcatcatcacaccggcatcctctcctgccccctctcctcttatcctcctgcaaagcagagaaatctgtccagtgggggacactcccttagcccccttatgttgagtgtgaaggtatgtaagccagccttcaatgcttttgtctccccacattttagacagcaaatgttttaactgcccattccttcctgttcttatggaactgttactctaaggataatgtgcaccattatacgtccatttgatgtgagctatctttgctcacttttggacattatgggctataaaatgtgtcctttcatctgaagaaatgtaacttggtggtccaaattagtacagtattttccgttcctatcctgtaataatattttaagcatttgcattgcatttaagtagatgcaatgcttaaaatgggtctacaaaacccagcctggggtaagtgtctatttctgttaagaccctgatctatcccgtcggggctactggcattggttgctcccatgtaatccacttaccagctatgcatggggtgcctaccccaggggaatctgccccatagccatctgcagtctctgactctctttttggcattatatgtctgacagtgcaagaggaataggtccagacttagcccatctctgcatggctgcagcaccaccccccatacccactcattttatgagccccagtggctaccacaagggagcacaccaaaaggtccacttgatggtgcccgtaatactccaatacatattcttatttactcttgctcccttgtactgataacacctattgtgtttctatatatttctcattgcatcttctataatttcttctttatcaagatagttgctcttttggtaattgtctttgtacttacacatttttattgcccttaatccctgttttgtgttttttcttttttggtatttttaatagagacagggtttcaccatgctggtcaggctggtcttaaactcctgacctcaagtgattcacccgcctcatcctccccaaactactgggattagaggcatgaggcaccatgcccggtctaaatccctgttatcttatttaacctttcattatctcattagacagtttttaatggcttctctcactcccagctattacctgaatcatactgaatgagattattctctttggtctgtgctccctctcacatttttagttgcattatttctagcgtgtcctataaaatgcatatattattttttcacacttcttctacctttatttttatcctagatctgataaatctattaaatgtgcaccctctatatttttgcttccatttccccattgatttcttggacaaacgagtcacagcctctggaagattgctgaagaagagctgatgcgcacagtatcccctgcattcttgtgtgtttcaaactgttcctttatagccttgatacttgaaggagatctggactggatatgagatgctaggttcatatttgaatttctgatttcagatggcttttccatcctcatatgcttgattgagaacatttaattcacacagcactggtgtgttgtggttttctgcactttatagtttatttcgccaggagcattttcttaagatggttttttaaattcttgttttccactttatttttgttgttgtcgttgttgtttattttatttttttaagttctgggatacatgtgcaggatgcgcaggtttgttacataggtaaatgtgtgctatggtggtttgctgcacctatcaacccatcacctaggtattaagcccagcatgcattagctattttccctgatgctctctttctcccaacaaccccacaacaagccccagtgttagatagttccccttcctgtgtccatgtgttctcaatgttcggctcccacttgtaagtgagaacatgcagtgtttggttttctgttcttgtgttagtttgctgaagataatggcttccagcttcatccatgtccctgaataggaaatgatctcattcctttttatggctgcatagtattccacggtatatatgtaccacattttctttatccagtctatcattgatgggcatttggtttgattccatgtctttgctattgtgaatagtgctgcagtgaacatacacgtgcatatgtctttataatagaatgatttatattcctttgagtacatatccagtaatgggattgctgggtcaaatggtatttctggttctaaatctttgaggaatcaccacactgtcttccacaatggttgaactaatttatactcccaccagcagtgtgaaagcgttcctacttctctgcaaccttgccagcatctgttgtttcttgacattttaataatcaccattctgactggcatgagatggtatctcattgttctactttcttttatggtaatttgatatagatttaggttcttttatttcatggatttatactatttacaaccctcctggtttaagagaattcttttctgtgagtgtaactaagtatacttcctctttacctttttattttattattatttgggagtgaaagtgagagaggttgtgtgtcttccaacttttcgtatctcttttttcttgcaggatctgaaatttcccatcttttgcttcctctttgttttaccacccagtttccaatggctgtttctcccttctctcttcctttgtgtccttttctgccctaagcaatgcctcccagactgctgccttcaatcgtgcacaggcacaaggctgggacttaggggtcccatcctcattgtcagtgctgtggctcaccaggaatctttacagtattttatgcaaaagattgacgttctttccaccaacagcctccaatcaatctttgactccactgacacttccctcttctctcttccatactgttttcccagagcttgtggccacagtgtgacattcagctctgctgggatttggtgtcaacgttttttatctacacgtgatctgaagattgtaggattctctatcttctagctagaccgaggttgtgggtttggtatagttttgcttattcttcttgctggtctgtatggctttatgggtggtcattgcactcatctaggccacctctttccaaatggtacttaggcacaactagagaacaagtgttattttctgcagggctacagtcatcctggagatgtagaaagatctgagagagagaaagctggtgccttctttgcatatgagaaagtcattcagttatctaaggcacacatttatctaggacatagaactttcagggcaaaaacaacaatcaaagaaataaatccaggcatttgatttgaagagcttaattgcattcagatttgcttttatactgagtgttagggaatataaaataaaaatatcatactaagcattgcctattacattcaaatactttcaaatttgtcattcacccagcaaccttataagtagtaatgattttatcatacaactatttctacacttgacagatgagggagcaagactcagagggactcactcacatgctcttctggttgcaaagttgatttgagtggggccaggagtgaaacccaaatcccctggctgaaaggaccgtgccattttcagcactaaccatgcttagtcatagatgttttcacgaatgtgatcttttttttccccaattttctgttgtttaatcacctgtaacctaaggccactctgtgataacaaatgactaggggaaaatgcttttgagtgtcatacttctcattgattaactctgtaaaaacaatgtaagttgcttgtccaggtaagtagaaagccttttctccactaatgattcaccttcttctctcttttcacagaggacagttatgggatggatgggaaggttaatcagccccgtctcactgcagacatcaactggcaaggcctagaggagctacacagtgtgaatgaaaacatctatgagtacagacaaaactacagacttagtctggtggactggactaattacttgaaggatttagatagagtatttgcactgctgaagagtcactatgagcaaaataaaacaaataagactcaaactgctcaaagtgacgggttcttggttgtctctgctgagcacgctgtgtcaatggagatggcctctgctgactcagatgaagacccaaggcataaggttgggaaaacacctcatttgaccttgccagctgaccttcaaaccctgcatttgaaccgaccaacattaagtccagagagtaaacttgaatggaataacgacattccagaagttaatcatttgaattctgaacactggagaaaaaccgaaaaatggacggggcatgaagagactaatcatctggaaaccgatttcagtggcgatggcatgacagagctagagctcgggcccagccccaggctgcagcccattcgcaggcacccgaaagaacttccccagtatggtggtcctggaaaggacatttttgaagatcaactatatcttcctgtgcattccgatggaatttcagttcatcagatgttcaccatggccaccgcagaacaccgaagtaattccagcatagcggggaagatgttgaccaaggtggagaagaatcacgaaaaggagaagtcacagcacctagaaggcagcgcctcctcttcactctcctctgattagatgaaactgttaccttaccctaaacacagtatttctttttaacttttttatttgtaaactaataaaggtaatcacagccaccaacattccaagctaccctgggtacctttgtgcagtagaagctagtgagcatgtgagcaagcggtgtgcacacggagactcatcgttataatttactatctgccaagagtagaaagaaaggctggggatatttgggttggcttggttttgattttttgcttgtttgtttgttttgtactaaaacagtattatcttttgaatatcgtagggacataagtatatacatgttatccaatcaagatggctagaatggtgcctttctgagtgtctaaaacttgacacccctggtaaatctttcaacacacttccactgcctgcgtaatgaagttttgattcatttttaaccactggaatttttcaatgccgtcattttcagttagatgattttgcactttgagattaaaatgccatgtctatttgattagtcttatttttttatttttacaggcttatcagtctcactgttggctgtcattgtgacaaagtcaaataaacccccaaggacgacacacagtatggatcacatattgtttgacattaagcttttgccagaaaatgttgcatgtgttttacctcgacttgctaaaatcgattagcagaaaggcatggctaataatgttggtggtgaaaataaataaataagtaaacaaaatgaagattgcctgctctctctgtgcctagcctcaaagcgttcatcatacatcatacctttaagattgctatattttgggttattttcttgacaggagaaaaagatctaaagatcttttattttcatcttttttggttttcttggcatgactaagaagcttaaatgttgataaaatatgactagttttgaatttacaccaagaacttctcaataaaagaaaatcatgaatgctccacaatttcaacataccacaagagaagttaatttcttaacattgtgttctatgattatttgtaagaccttcaccaagttctgatatcttttaaagacatagttcaaaattgcttttgaaaatctgtattcttgaaaatatccttgttgtgtattaggtttttaaataccagctaaaggattacctcactgagtcatcagtaccctcctattcagctccccaagatgatgtgtttttgcttaccctaagagaggttttcttcttatttttagataattcaagtgcttagataaattatgttttctttaagtgtttatggtaaactcttttaaagaaaatttaatatgttatagctgaatctttttggtaactttaaatctttatcatagactctgtacatatgttcaaattagctgcttgcctgatgtgtgtatcatcggtgggatgacagaacaaacatatttatgatcatgaataatgtgctttgtaaaaagatttcaagttattaggaagcatactctgttttttaatcatgtataatattccatgatacttttatagaacaattctggcttcaggaaagtctagaagcaatatttcttcaaataaaaggtgtttaaacttttttctgtttcagagaaatgaacttaaccaagtttttgtggtacacccatttcttgcaagtaaaattgagtcatgatctctatttacatgattgaatactaaccaaacttataaaatggagctgaagtcaatgtgttatagaacgttctcagattaacaacttcaccacggatttacctcattgctgtcttgagggaggcagcagaggcagcgccaaggtagctttcccggcaggcaacctagatggtcacaaagggccagcacttggtttaatgctctgatgtcaccgccnttgaaatccttaataattttttaacaaggggccccacattttcattttccacgggggccctgcnaaatcaggtctgggcagaaccaaaaatggttctgggcagtaaaatggaatttttcaaaaccaagagaacagaccccactgaaggcagtgtcggttcttcaggaaccaggaacttgggtggaaacctnaaancacccttcaagatctcaagttttttgatacacaaattccatatgcttccttctgtctgttccaaatctcctgaagaaatttagccttcaggttgaggggctaaaaatctgtgaaatgtccagagaccagaaggttaaaaataaataagaagaagaaaaaaagaaagcaaagggtcaggggacctaccaatccaacccttggataattgaggaaaccaagttttcaagagaacatagtctaagataatagcattgttgtccaaaggcgcatcttggtgccttgctccttgttcctttctgtaaaatgtgcctgagtcaaatattgccatcctggagaaaaatgcatcttagttccattcaatagctgcatatggagtacctactatgtggcaaggacatgagagggattgcatgtctcccagagctgtttatcggatcttgaaaggcccttagagattggctgcccagctagcctcatttgatttgcgaggaagctgaggctcagaagagctgagcgacttctttagacnnnnnnnnnnnnnnnnnnnnnnnnnnnnnnnnnnnnnnnnnnnnnnnnnnnnnnnnnnnnnnnnnnnnnnnnnnnnnnnnnnnnnnnnnnnnnnnnnnnnagcggggcgtcacgtgtctgtcagctgctcctgggttagcgccgccttcacaggccggaactttcacttctctttcccctcctgtttataatatctacccccagccccacctcaacctggagaaatcttgtccatcctttaattcccatatcagttcaaaatttaccttttccttttgtgttcactttcctggactcatcgacccctgaactttttatgtcctgtattttccccttttgtgtgggtattcaaatgctgatgttgtaccaagtctgcggccaatggaagaaaaatcactggccacacgtatcacctcacccttccccactgctgaccaagaaactgaccctcatgtgaccatcattggttgtggtctagttaactcacctttctctcagtggtgttgttgacactgagcacgttgccagcacagtaccttgggccttgtagtgacccctctgctgtttgaagtaagtagagagaatgacttttaaaaatcaaattttctctgttgagaccacagaatccctgagccctcacgttgggggaagcactacagaaagataggggacaaaggaatccgcactaccttactcttcagctggcgaaggtattgctttctgtctgaatttcctggtcctcgtatcagtgggcctccttctggcactcaggtccagaatctgcatccaccaccgggctccccattccttccctgacgtttcccctttccagccccaacagggcgtatgactcagagctagagcggaaccaacccaacctctattaagtttcagcaggagaggggtcatggacccgaccctgccaccctaatctgttttcgcatcactaagagcatcaccccatcaagcccaagaaccagagaacacgatattagcattgtgttttccaaaatgaccactaggtggtagtctagttcaactaaagacatctttgcttggctccaggacccacccctgcaaagcagctactttgatttctaaagtagcagcgcacctctcggtgttaccattttgacaagaatacagctagaacagcttgatccttggcagacttgccctttcttcagtgcttaggatcttagccattccagcaggcgaaagaacagtttttgcttctgatttatattggtattttaaattggaactgcatcaaactttgacgtttcaattcaaaagtgagcactgaatatcgatctccctgctttccaaagtctttgtgcaattaaaaatgttttttagctcccatacactgaaccaacagaggtcatctctgcctagctggcaattttgcaaagaagagcggaactagatgctttttaacagctcttaaaacactgaggttgtaccaagtctggtgctaaagcaaggacgacaagtgaccatattcataacctttccccctcctcatttcttaaaaagaaacattttctaatgtgcctattcaaaaagcccaatacccaaggacgtcatgtctaaaacaccaaaaacaatggccacaaaagccaaaattgacaaatgggatctaattgaactaaagagcttctgcacagcaaaagaaactaccatcagagtgaacagacaacctacagaatgggagaaaatttttgcaatctactcatctgacaaagggctaatatccagaatctataatgaactcaaacaaatttacaagaaaaaaacaaacaaccccatcaacaagtgggcgaaggatatgaacagacacttctcaaaagaagacatttatgcagccaaaagacacatgaaaaaatgctcatcatcactggccatcagagaaatgcaaatcaaaaccacaatgacataccatctcacaccagttagaatggcaatcattaaaaagtcaggaaacaacaggtgctggagaggatgtggagaaataggaacacttttacactgttggtgggactgtaaactagttcaaccatggtggaagacagtgtggcgattcctcagggatctagaactagaaataccatttgactcagccatctcattactgggtatatacccaaaggattataaatcatgctgttataaagacacatgcacacgtatgtttattgcggcactattcacaatagcaaagacttggaaccaacccaaatgtccggcaatgatagactggattaagaaaatgtggcacatatacaccatggaatactatgcagccataaaaaatgatgagttcatgtcctttgtagggacatggatgaagctggaaaccatcattctcagcaaactatcccaaggacaaaaaaccaaacaccgcatgttctcactcataggtgggaattgaacaatgagaacacatggacacaggaaggggaacatcagacaccggggcctgttgtggggtggggggaggg

SEQ ID NO: 24 - DNA, 171936 bp, Mus musculus
gggagagggagagggagagggagagggagaggaaaaaccctacttctgtggctctgttaatggaagcaagctgggagcgattacagagattttcttagatgccataatgctgggaaggccttctgggaaagcagtgtgcccctcaggggtgcccactccagtcctgagggacgagggtggcaccatgtctacagcctcctgccaaggggcctagcaacatgtacaagcccacgtgataaacctaatcaactgtggcgccaggggaaggggtcagcttcgtccactgtgtggtccttccagtgttgctatgtgttcacatcattgtaaaaagagaatctcggggagccaggtcagttggtaaagtacgtgtcccaaggtgtgtgtgcctgagttcagatctcaggacaatcttgcaaaaccagtgagtactgggttcagtgagagatgctgtctcaaaaaataaagtggccatttactagagaagacagaggtaagagagtaacgtcaggtgtcccccttgatcactacctccccccagccctggagttacaggtatgcagtcatccctggctttttacataaaccctaggggttgaactcaggtcctcctgcttgcaagggcagtgctctcccaaccaagctacctccctaacccatcttcattcttttttgttgttgttgttttttgttttttgagacagggtttctctgtgcagtcctggctgtcctggaactcactctgtagaccaggctggcctcgaactcagaaatctgcctgcctctgcctcccaagtgctgggattataggtgtgcgccaccactgcccagcccatcttcattcttaaatgggaaaactgagtgggtggggctggcagagtcagcaaatgaaccacctgccagtcagtggctgagctgagtgcaggctgctagactctctcaaccctagagcagcgtcgagccatggcccgccatcataatcacaatctataaactataatcaaagctcagaagtgatttctctagaatccgaccataaaactagatatactgtcccagagaaagccctagatcaaattacacttacgaacaaatgaattgtacttttcccctcaagaaaacaaagatcccagggctggaaagatgatggttcagaggttaagagcacacactgctttgcagaggaccaaagttgggttcctagcacccatggcaggttgcttataactgcgtataactctagctccaggagacctggtgccacgttcaggaggctctgacgccctcttttggctactgaaggcgttgcatgcatgttcacatacccatacacagacacacagaaatatgtgcagataatttaaaaacaaacaaccaaaaccgaagcaaaacaaaaaccaaacaaacaaaaacaatccaacttgaaaagaagagtctttttgttctaccttgtccagagagagacttctgctttgcccggggcctcgtgcctattttcattgtcaactccatctgtcctcacatgtccatgtacccacacaaacctgggccacacaactgatacagattcacataaactttctgacccatttctccaagagagaccaatggtctaacatcagacaacaagtctgattgtcaccatgtcctcgtggtctttgaagagtgtcttaactggagactatcccactctttccctggtaagaattcacagtaaacaccatcactctttgagattgcccgtggcaattacagtggtttataattctcctccctctcaaactagaccttgattcctaaatgtgcacttttaagcgtcaggcgttagaataaattagactacacaattacatgtaattaaaggggggaaacggccgtggtgatgcaaagatagccgcattttgctgaagtaaagcctgtctgtgaccgtgtgctggcccggagaggccacatgaaatacaattagtgctctgttttaatggaggcctatggagtcgctctcattatcacaatatctgaagatatataaacagcttcttgctaataccagggtatttctcctgacaagacagcttgggttctaactgcgagacttcagcagaattaaccacaaattcatattgttgtgcaagaactggaatttggtttttttttaagttgaaaaaaaaaaaacaaaaccccaaatctctaatatatatatcccctcaagatgcaattctccccatcttcctcctcttcatcaatgcctctgatacagaggacattattacaccttattggtattttaaaagcctatctatctccactcaggagccaggaagtttgagctccaccctggagaagcaagtcacagccaagcatgcatgccttattaaagccacctgtgcccccagaacgtggggcctcagccagagcccccagcctgcagccgtgtccctacggttactgtttcttctttacacgccaatttgtttgagacatgttaaaaggttgtcttttataaccctcataaaataccatcgacttcgcccagatgcagccaaaaaagctgagaccgtctgactcatttcaacctgtgggccaggatgcagaaagacccacaggagttcccgccattgccagagaaccaagggcataacaatgcaaaggaccccatagggtaagtagcacccacgatgtcctgcggagtgagccaccaaggcactgccacagagaaaaagcaaggcataggggtgtcaggacaaaggttctcaaggttaaaccaacaatgggggtgttagcttgagagtctggagttcagacggctccatggttgtatacccagctctgctatttgcagagacggatattaatcaggagcacaggggtcatagaagaaaggctggcctggaccaagtgtctagaaggcaggggctggaaactcaggtcctggggaccctgtgtagcccacccaggccagagatgaactgtagaagagacagtgactccccaggctgggggactctgaccctgaagtccctcacatctttagatcgacacagaagttcttgagtggggccagccgttttcatcttcctggaaagagcccaggcaacaggctgaggcccagaccagcagggttaggtgtgcactaggagttagggggaagtcaattgtcttaactgattaatgattccctgaatcacacacccaggtacacacacacacacacttgtccctaagctctgtctcctcctctgtaaagaagaaaagtggtcaggtgctggcattgccaccactttccatttccattacaacaaagaaacataagagaaatcacatgataccaccctcctccagcgctcagtcccaactgggagactgagaactgccctctttcctggaatttctgttgggcacacccatctacagagagtcaagtctgaagtgcaagggtgtggtcctagtgttttctgatgtaaatccccaacttctagagcattctctagaacctcagagcaaacagggcacagattccattctgcatccttcctgcccagaccgcaataggacactgcagacctgctagaaagtcactgctgaaataaggcatgtggttcaaagccaggtgcagcctgtgggctgtgtacaagcctctgtcatctctgagcatacatgttctccaaaaactatgaatgtacacttcatgtgatgaccaggtgcaaagctctccatttggccacagaacctgctgttcttcctgggaggagaaccccaagccaggatgggtatagcatgtaaagttacctgttgcagaaaaagagaaggatacaaaaagatcaagtgtatacattgttgttgcttcgtgtgcttctgagacagtatcactatatagaaagtttgactttgggtgatcctcctgcctcagccttcccagtgcaggcatcacagatgtgggccacgagaatactgtctgagttgaccctataaggatatataaattaatcaatttaattattcaattaaatgtctgggatgttgaaactgattacacctgcttttctatctgttttattggtttattttctgagatttttttccttttgttttgttttgttttgttttgttttgttttaatagggtctcctggacctccaactggtcttaatcaccctgtgtgtagataagggtgaccttgaattttttattttcctgcctttgcctcccaagagctgggattgcaggcgtgcaccagcactgtacatttgatgtttgtttgtgtgtttgtgctttctaatgaagttctcagaatctcaaggatgggagccctctgccccaagcatccaatgaacagcgctgcaggggcccagccccttctcatgcagcactgagactggaatgcctgggggtggggtggagggtgggggggggggttcatgaaagcgaatactcacgcctaacatcctgtatccagccaggactctacactagccaaaggtggggcttgcccccggcttaggaaagcaagttcagggttagtacaacgactgtatgggcggagtcgagagccccccacgcagtccagacaacccgcttgaattttagataaacagcgaggacgtgattttagtgcatctccatcggtgccctgttatttttactacgtgaatttgacaaacgctatccatcagaaaactagaaaaatcccaccaggggaaggaggatcttgaaaataagcgcagcctggggggtcagatacaactccggagctcagcttcttgggttcagatcctgatccaactatctgaccttgggccaataacttaacggctctgtcttgatttcagtatctataaatggatgaacatcttggaagactttcaggggttacgtttccatccgaggcccgccccgttccaccgcagggtcgataaccccctagcacatcagctgtactttctgaagctactggtgggctctgtgaggctcttcacccacccttggcagccagggccccctcaagcctctggtggcttcggggacggcagaaaccgcgcagacagcaccacctggagtcagagttctccctttaccaagggaaccggcctcccctttctttcccattcccggcccatgtctgggcaacgcttctgctttcgcttgagctcaacttaatttctcagagagcttcggagacgcgtgggaaggtcccaggcgcgtgggcagttcctcccgcgatctagcttggggatcggcccgagccggcgtctccaatggcaagtgtgtgcgtgtgtgtttagaggcgagcgcggggctttcagctaaggctgccgggtgtttgcaaaccagggcgagcccctgtgaaagcggataaaagaaaacatttattaacgtgtcattacgaggggcagcgccgggccggggctgtcgcacgcctcagggaacacttggctcctcgctgctgggagggaggaggacgaaaaagcggaaagaggctggattctctgcgcgccagcccgggggcctgatccatggccctcgcgacttcgcgccggtgtctggtggactaagagatgcgcccccggtccgagtggcacacacgcgcgcacacacgcacgcgcggtcccggctcgccggcagctccctgctcagcgcacatcagcctcaactccgcgcccagggcgagcgggagcgggtgcgggtgagtgcgccccgggcccgcgagggtgcgcgctcggcggcgggagcgcggccggccaccggctcggcaggcagcaggccgggagccgccgggacttcgggccggggcgcggggcggccgcggcggcggaggtgaggagcgatggctgaatcgccgggtccccggcggggcgggaggcggctgggtcctgggtcctggcgcgcgcggaggccggggcgggcggggcgaagcagaagccgggatgccgcggaggcggctggagcagcggcaaggcagagtcccctacgccccgcggcccggcccggctgcggcagagacgcggtgaggccgcgggggccgcgcggtgagtggggcgcggggccgggcccggatcacagattccagggcgagcacggttcaggtgagcccagccggtccccgctgcccggctcagggagggtgttacccggaggtttaggtaccggccggcctcagtggggctgaccgatttgaccccgtctgcaaggctgggcggctaggggaggacttcccgcgccccggtggttcccggggaagggcgcgtggacccgcgggctgcaggagcatggcccggttgaccccttgaggtttagatccagagggccagctagaagccagaccacgtgtggcttgtccgggcaggacccgagcaagcagggactaggaactcgcagaacggaggacaaatgaaatcgtaaaacttctcccgcgccaggtcagaacccatcgccctgcagacctgcgtccgccgcgggctccagaagcccggaggggacgctgcagcggggactgcgacttcgtttagagagtagtagttcattcattcattcattcgacaagcatttgtggcgctctgagtgtaccaggcacggagtgtcacccagggaagcgcggatggtagtgttagtccctgcgagggcggctggtggcgaaaggaggctccaagtgggcagatggaaggagccacccgcggggccatgggtctgcttagtgatctctgcctggaggggaccctgagagccttgtctccctacacagaaggacgctctgcacagagcatggctgtggtgacccccgccttcccccttccccctccccacttcctgaaagttctgattggccccacccctccaggactggctctcctgcagcttgttttaatcactttttgagttaaaagtcaatatttaattaaccaagtaattacattcagctttcgtttgaatctggatatttgctctgtctgtggggatgcccgccctcttccccctttccatctgtccttgcctctttcccacggtgcacccccagctactctggaggtgacagagagcaggtgatgttggctttccctggggacaccctggattttgttcaccttgcagttcatgtgacccggtccagctccttgcccagaggggatcaactgagatacaaccattgattaaaaggggtgggagttccctaaacacccctccccccaagattctccacccagcctggctggtccccagggaaatcaaaacaacctgtttctatgtggttcagtgttgaaatcagcagtttattgaggatagtgttagcttggccaatggcatgatgaacccgctgtccctgccctgggctgagggtagtgtggctttggactttgtgtaaccctcttgagggttttttatttgaatttacaacactttctgaaaccttaatagcatgttaggttttcaggcttaaagtttgctgactcaagactggccccgagggagaaactccaggcacccttgtacagtctgtgtgcctgcgtgggaccccctgtcccacatggccttcattcaaggaccccatcccacagacagtttcactcttgatgttccaaatgccctttcacttgggaatccagcgcctctctgtagtctgggtttggtgctgggtttgacggcttttggcccctgggtatgtggaggattgtcacacagccattatcttttcttagactatgccctctctgaagacctgaggcccttcctgcctttctgaccagttcaaagaaggttccccttcacctcaaagataagaggcaggaagtgtttgagcccggcccttagacataatagtcacgtgtccacacaaaatctgtgatacattcctcacgctccaggtccactctgaaccacggggttgccctttcaccaggtgcttgttttctaaatgcaggggacaagaaacatgactagtaaaatagtaaagctagttaagttagtagcctgtctgaatcctttcccttccccaagaaccgctgctgtcgtgggtaactgtggggcggtgccctggtttgtattgtgtgttgttattgctgttttctctggcttttggggtttttgtttgtttgtttgtttgtttgtttttgttttggggagggtttggttttagttttgggtttttttgtttgtttgtttggttggttggttttggttttggttttggctctttttcccccttctctttcccagggtttcatctcctctcctggtgtatatgtgaaggttctttcaaatgtggccaatgaaaaccatgcaaaaaataaggatttttttagctcttaaaaagcacagggaatgacataggacattgtaggagtgagaccctcttgtggctgctggtggactggcctcagagcgtgtaccagggacttggtttcagactgggctctgtgtgtcagtggacaagaaagcgagcctctccataatgaccatagcaggccaggacaatctggctatggccagccctgggggctggcctggtggggaccccggcagatgcccatgctccagccggcttcaaggcgctatctaattgggagatcattaagatcattataattaattggcatcctgataaatggcgtgattgcctaattggggtggttgctagggaactagacctcacttggagcctagaggggaagaggcagtggctggctgcagttgggcgctggggttacagaccctgcagctcatgggcgggaagccagaactgtatcacccacatctgctggcagctgctgagtgtagttgtagatggaatgtgggctaggggtgttttcttagaagggctgcaatcaggaccctttcttgcaagccattgaaagagacgctctgaaatcactgggaggcaaaggaaaaatgcccgacgccttgcacagggccccaaatcctaagacagccttggcatcgtgcaccactggctcagagactcagcatttgccacagacgccattcttccatctccgctctgccctctacctcactctgtgccttcctcagaactaaagctgcagtctctggcagccccaggctgggtgttttaagacagccggtccatctggccacctgcccagtgatgacatgggggcgtgtgactcaaccgttctgtgcctctgtgttctcatccaacaagtgctgggggtaagtccccactccttcccgagtctgtgggccagagcgagatcatcagtaagtaccaagtgcttagcatctgccccaggtaaacctggaccacagggtggctgctctctcacccctgtggtcacagcccaagaacagaagcaagcctctttgcagtgacagtccctaagcccccagatgccctcccatgagaccactgaccagttacacacgccctctgactatggtctgaatgagaagagaggaccccttggtcccacaagtgtgacaaataagcatggtcatttggggagcaaggagccacgtgtatgggcagccaatcgtcagaagggcctgtcagcaccctggctgaggtgagaactccagggacattaccaccctccccttcccatggggtctttgggaaccagaggctatcttagctgcttcagtggataaagctgcagcctggctttgatccaggcctttctgggggctgagtttacctggctctccaccatgaaaatcatcatgaagtgtttgtttaaaaaatgtaaagtcccacagagagagcaggcaccctgcatatatatgttcacgtcagcaaaaggcttggaaagagggccctgtctactagagggcggtagggaatggtaccctagatgagaacagggggacagaggtaccaaaatgcaccctcgccttgaacatgacaaccttcttggtattgtgaaggtcctattattacacgatcccacatcgggccaataccacaaggggtcaagttccccatgggtcccagtaccataaggatcccagtactccatgggtcccagtacagcacagatcagattacctcttgtcactagtaaatacctgacaagagccaggtgctgcctgagggcctagcccagcaagagagagcctgggccaccagagacacaaggcccccaagagcaagcggtgaatgggggccatagtcaaggcagtttataacaggcttcaaaaaaaaaaaaaaaaacagtaataaaatacaagacaccttcaccagtgcaaagcacggtgaggcatcttcagggaggtggtccagagaggcctccctgaagaagagatctctgagccatggcctgaagtgtaagaaagaggctggcctcagggaaaagacaaggaaagaacacttgaggtggtgagagagcatcctgtgcaaaggccctggggtagagaacacgggttgttcaggaaccagaagtccagtgggagtagggagccatgagtgagtggtggagacaaagacagaagtgtgacattcagactttagattttaaatgacatggacaatccgaggaggctgtcagacaggaaggagcgagcccatctgtttcagaaaacctcggctcacacgatcaataggctcaatgctaagtggggagacaatgcccggggccatcgggaccatgggagtcagaacagtcaggggacaaaatcataatgatggtttgggttggatagaaatttggggtgtggagccaacaggacttgagcgggtccagggttcagaataggaaaaagccattgattctcaaacaagggtgctcttgctggctaggggacatgcagtgttggtgaagacaattttgagtgtcacaaacatggcacccatgggtggagactgtctgtgcctctcaccatctttcccttcgagggagggccccacccaaagagggaacagagtgctgaatgcactggccggtggcctgggatagggtggttcctaagcactgtgaggagggagcaggggggaaggctaagggaggactgagtctggtggttctcgaggcccccggatgcctcgtgtgtcctggatgtgcgagtctgtagcctgctgaggctgaaggcctgaacttgggagctgttgtgcttcccagttattttaagccatgtggctagacacgcttacaagagagagctcatattgtgttggctggtgtggtcccctgtccccagggcctgttacatacctattcggtgaatatttttggacaccccactcactctcctctctgttcctgggagcactagaatgcgctggctgagctttccatgactgactcctcaactcctgggtgattggcagacagaaatccccactgtggcagaggaaacagggtgggggttgcggggggggggggggcatctccaccctgacaggtggcacaatgcctcctgagtagagcagccttctaagcctcctctgcagctgagtctagcactttgctagattctcacagaccagtgttttacatctccagtctcaataggattgcaaaacacacatagaccccgtggcaggggcaccagactcatagctagctgtctgttgtgaaagacatggccccctgctttacacactgggccccactggagacagccctccattccagcccagactcgaatccttaagctaagcacgcctgtggggcctcggggtaggggaagctgaggccataagctgggggacctcaagcagggacataagatgtgtttggccaggtgggcgccagatgtgtctaagaagtacgttgctgacagctcttcttgtgggcccatggctggaactctagcaggagtctgacccacctcggtagccagagaggtggggatctgtgcaaatagcccagggagggaatctgtgcttggtgagccctgcctaactgccggctctagagactcggcatgctgtctggagacttctaaggccagctgctaagttggatgtctcagagaacagggaagccgaccaaggtcgttacgatagctcagagtctaatcaccatgctttctttacttatagtaaaatggaattcttggcttagcgatctgggcaattgaagtttctatttcccaacacaacaaaacattccaagtactggagagcccaagtcttgtcttttgaaaacatcttagaatgatgttttcagttttctgctatccactgtccctctgtccttcttactgtgtctttgaccttcttgttgtctcttgttgtagctgccacagagccaatcatcaaccccccgccccttcaaagtaggatataggtcagaactttttttctcgctcttattttccaaagaacaaaatccttctgaagctcgccctgccgcaggctttgctctgtgcctccttggcccctggctgggtgttgtactggattctaaaccaaatgccaggaaggagggaaggataagcgggttttgctgatagtcttagcgcaatgctttccaaaccaacagatcaaacaccttcgggttttagcaagtgctttgaggggaggtttacctggaagggactcacagataacttatctgcaccgtcatcagtgaaataccccgattaggaatgaaagggaaaactaaggcagagtggcttataattaaacacagtaagcacactgcagcccagcacctgggtggggcacctgggcggggcacctgggagggactggcaaaggtgccctcattgtgccaaggggcacaactctgcaggcagtgcaggtggatatttggccaacatgaccataaacattttctagcagctgaggagactatactgggtggataagccacatgccaagaagccaccaggaccttaactggaattccccaacacctatgtaaagaaagacccaaagtgtggctgtggcacccacaatcccagcacaatggaggcagaatcaggaggaccccgaaagcttgctggccagatagtctagctgaattgttgagctcaaaacaaaacaaaaccaaggtcgaagacaacagctgctgtcagcctctggtctctgagctcacaaacatgcacacatatgccgtgtacccataagacaatggcaattttataaaatactgaacaaatggccaaatttcccaagtgaaatgactcttgctcttcccttagtttgtctgggtgtagggtaaaaacaattccacggtgatcttcttcatgggtagcagtccttttcttggctcttgaagctgtcagcagctttctcctctgcagcaaggtctggcagaagttagttaggaaatcatcctggaactctggtctcctggtgcacacttgtgatccggaggctaaggcaggaaatcatacagagggagtttgaagctagtctgggctacatgagattctgacccccaaaatcaaaatgggcctcccctcagcactgcagtgagtcatatggtgcctcggatgtcctcacacagtcccagggtggcccctcgggcaaggagagactccctgtgagtaacagtttacagcagtgcggatttggagaactggaggcatctgccctaaagatgctgtgacactgagtgcggccagcctttgccacagtcggggccaagtgtctctggttgatcttgggatcattgtcatctcaccaggcttagatggagcaggggtaaaagagacatcctggaggtcacggtgtcacaaaggcaacagctctaatctgaacgccttgctctgctctgcctctcaagagctgtgtgcaggtgggcgagccactctgcacctctgagtcacttttgcctccagtggaaacctggacagccattgcagcctgttccctaagtagctgtggggacccaggtaatgcctgggcacgaggtcccggctacagaaaagctggcttcctatggtcactgttgtagctgtttctgctcgtatctgagaatcctttcttagcttttggggcagggttgactgtgtctttggggcactggctctagggaagggcactgaggcagttgaacacggaccagtgggccagaaaggaaggtatcattggggtttactgctcggccataccgtgtcggctccccacccatcctaccttctcttccaggccccatccacactagcccaggaaggaagccaagctcggggcctagaacctgtcctgacaacccagggtggcacctgtcactgtgaggataggcagatggttggaaaaaggaagtcttagaatctcccagtgccctggccacagcctgatggtaaatcgagcgcctctggagtcacagtccaagccttgaggtgcttcacagctgcctagagaatgccagtgttctgcactcttgggaaccataaaagcaggagagaaggctcaggtatactgcctctgccaagtcccaaaggggctccttgaggtggcacacagcctgaaatagcttatgtcagggcctgttcctgtaataaaatgcaggctcactgcaatatcctgccctgtctgtacccccaccccaccccatttacctctcagactcttgaggctggttgcctgccctcccccactccccatacactggacacttcgctcttcttggatgccgtaaagtgatctccaacactaagtctagatacttgctctttgaactgtctaatgtcacctctggctccctcagtctccgctctaatgtcactctaggatgacaatgtttcctttggaattctcttgtttgttattggaattctcttatttcctctctcctcattaaaatgtcagcctagtgtggtggggccttggtcttctcagagcttggcccagccctgcaggtaccccggaaagaggcctgcagattggctgctgaaaggaacggagtctgtccttgctggaaggtgactgactgctcagaccctggaagtccaaacctgtttgtcgctggcagagaacaagcttaaagtggaactggttagattcacacattcccacagtagctggcagaggaggggtcatcaccctgatgtcccggcagggacagcaggcctcaggaacacggggcgcttgggccatgtgggaagtgaaaagttcacctttgagacaggtgatgtgcctcatctcctccctggcctcccaacatctaagcgcatcacaggatgggctctgagcactgcctgggttccgggggacccaggatgatttagggctggagtagaatcctgctccgtgtattaggggctcatgtctgcagacctgggagtacagagccctgtctagaaaacaaaagaaattgtaaggcctccaaattgactacccagggcctgtgtttggcttttatgttcttcacccatgtgttattttgaaccttttggggggaaaatcaattaatagaatgttggggtggggtgtcccccccaacagggtcttgctatgtagcgcaggctgacctggaactctcaatcctcctgcctttccgtcagcctcccaagtgctagaattacatgcatatttcaaaagttagagtttcagttagagacagtgtgtgccctgacaggccacctgagtgcctcttgacttagccaagggctgcgcctgagtccggccacctctgttcttgccctgcctggttagttttcccacggtagaggcggcctctgcagaaaacaaagccagagtgggggtggggagcagtggccctgtatcaggcccagggggagcagtggccttgtatcaggcccatttctccaatcacaaggcccacacagatgtcagcaccctgcgatgacacgctttcagggacaacacactacacacatgcctgtagtgatactgaaatcttacacctgtcaggtagcacacacctgtaatcccagcactctgggtgtgggggcagtggggtcatgggttcaaggccatccttggctacatagcaagcttgagacttagcctgagctacataagaccctatttcaatactagtgctgctgctgctgctactactactactactaatactaataataaaatctgccctgtatttgttgcttggcatttagtcatccccaaaatctttaaaaacaggaagttggtcgtgtctgtctagtaaggggtaaactgaggcacgatgtggaaagcttcagtggggtcattcattaagatccgtcatcttcccacgtccattgctaggctctgaggtgtgtggtggaggtggcagtagctctcttgtgttctgacaatgcgtgggctgccagtgggttgctttgagtgaccccagtgctggtcacaggcattgtttcctcagccgggctgactcccacatttctgtgtggcctgagcagccacatggcagccggagtgtagcttcaggaggggcagaaatgagaaatgccgagtctaagccttacacaggtcctgcgtcacactggccgttttctctaggataggagaggttgaagaactgcaccgtttcctggggtggaggctgcacacaggtggggctgcccagcagagtctgaggaagtaacaagtcacccacccgtcccaatgcttgccccaggaactggattcgtctgggggcactgaaaggctcagggatctgtaggagagctgggcttgggagagcacaggacacagtctggaagtctggggggtctctgagcaggagttgctagcggccttttggagtgtggcatgagggccactgagagaccattcacccctgctggggcccttgctctgagcactatctgggaggcctgagctcaggaagagtctcattggctagctctggtcacatggtcacccttggtaggagagaatatcctctatgaagtaaattgagttactgttttccaaagaaggaaggggaggcgggtgcttctcaggcaggagaaatgaaaagtctgcatgcgtcacccttcttaccaagatggagcggctatcatctcaaaggatggagtttttttggtttggtttgtttgtttgtttgtttgttgtttttcaagaccgggtttctttgtgtagccctggctgtccaggaactcactttgtagaccaggctggcctggaactcagaaatccgcctgcctctgcctcccaagtgctgggactaaaggcttgcgccaccaccgcccggccaggatagtttttttaaaggccggcagcgacagaccctgtagtgaggtactgggcagagtcaactcccctcatccagctgttcctcagtgttcttgtctggaaaatgaagatgacctgtgtaggtcctcccggcaccccaggtcccggacacacccccaccccagccttgtctggacctgggtttctcggtttcctttcttgcagccccaggatgtgcctacttaaggacgctcaggctgatgcctggcgccctgcagtagcactgccctggctcgtaggatccgcggcctcccttcagatatttactaacccatgaggcacacagggcaggaggtggggcccacatgttctctatccagcccatatatagctgggtaattggtcaaagggacatcaggcatcggtcccacctgtgtgtcccagtctctgggaccagagcactgggttgttaatatcgtctcgggatggagggatggcgcactcagccagtcatcaggcagaagaagaaatgactgggctattaatcccagcagtcaaaacgccctagtgttcctggatggtcttcctgaagaacaacaacatccacagccagaaacaccccccccccagtgctgtgtgtagggcacccatgggcacgggaagtgtggggctgagtgatagggcgagagaggctgggacggtcagtccccactgcacaccagcccgcaattaggcgtgaataacgactctgttcaagttgggctttattgcttttggctccaggccttttacagaaataactgtaactcctgccaaggaagcctctgtcctcagctgagaggaaagaacaaagaacagaggtgggaatgtctgcatctgattctagttccccgaaacacccaggaagggcagcaggcgtggctgcccacaggcatgggctacggtacagctgtgtccactctcggccgtgccagccaagcagctcccgcgtgcttccgccatccaggctctgtgggcttactccgattacggggcctttgcctttattaacattcccatgtggtgtggggtgggggaacttgggtgccacggcgtgcatgcagaagtcaggtgacaactttgtggagttggttcccctaccttcgtgtgtgttccagtgtcagagtccaggttgactgccttctgtagtgagtgcctttgccactgagacatcccgccggccctttcatgcgcctttcctttcctctgcttagaaggcgtttcacgagcattgcctgcctaggatacccaaggcctgagggttagtccccagcaacgggaaagaaggagggagggagggagggagggagggagggagggagggagggagggagggagggagggagggagtttcagttctaaccagcttctcactgaccttttgagtctcagctcaatgtcacttcctcccagaggcctcctctgattgactctctggcattgcccccctgacagattccttcagagctctcagaagagtctgaaactcttcagtagctcattctctgttgttctcgccagagcaccagtgtctggagccagcccttcctcatagtccctgaagcacccacacacagtggctagcacacacacagtaggtgctcaggaaagacctggtggcctggaagatttcctcacagccctccagccaagctgcagaggggcttcactgtctgtgggcttagaatggactggattccctgtggcctgtctcccagatctagttctttgtcctttttaacatttgatttttaattacttgtgtggatatgggggttgtatatgtgaaggcagcgcctgcagaggcattgggtccctcatgagctgcccaatacaggtgctgggaactgaactcaaggcttctgggagagtagtgtgtgctctaaaccactgagccatctttccatcccctaggtccttcgtctgtgcccatgtcccggactatagacaaaggctgctgcaaacaggtatctttttccaaaaatgaccagacagtcctgaaagttcttgcatggcaagccttcctccccaggtcacatcccaccctgtgtgagattttctgagcatctagactcttacaaacgaggaggggagctggcaacaaaaaccatggaaagaaattaatgttttctcgaacttcagatatgaaagctatttctgtctttcccagacctgactaggaaggtttgttgtcaggaaaggctggcaagacagcctggcatcctaccatacctatggcagaggcaggcaggtcaccgctgagtgtacagaggaaattccagaccagacaggaccagacagtgagacccttcctcctctaaaaaacagaaacaagctctaggggtgcagcctattggccgagccctgcccagcatgcacagagccctggggtccatccccagcactgcataagcacaatgtggtggggtgtggctataattctatcactcaggaggtgggaaagggatggtcggaagttcaaggtcacctttggtgagttcaaggcgagcctgggatatgcgagactttacccttaactcacacctgatcccaacccttcttgccctccggatcctgtttatcatggctttcactctactgagtcatacaagaaattagagataggttaccaggtctagagataggttacccagacttccttgggctctgaggaagctctggaatgggcatggggtcagcttatatcccaatagacaggtggctctcactgcccagcaggacagggacactgaggtgacggcctatgagccatcacactgtgtgtgtttgagaagtgccgcggagcctggtgtgttcatctatactgtgtcctctagactctccatggagaggtgaggctcatgtcctctgccctcagactaactcggctacatcacacatatccagagaatgaagggtaagagtgtaaagccattgaagggaaccggcagctcccttgttgctgggcacccagctttggaaccctctcttggccccaccccgagtccaccagaaacaggccgcacgcaagcttgctcagcagtcagcagataacccaagtcacagctctggagccttgccagccatggctacaaacagcagagagcaaccgttcttcctgagtctgacgaaaataagtgagcttgactcacggcccagaaggctcggtggagaaactgaccttaaaaaagagagaacaaggggtgaggtggggtgggctgggctggagagatggctcagtggtgaagagcaatgactgcttttccagaggtcccgagttcaattcccagcaatcacacggtggctcacaaccatctgtaatgggatctgaagccctcttctggtgtgtctgaagacagctccagtgtactcatagaaataaagagagcgagagagcaagagaacaaggtaggcaacagtgatggacacctctgcaggcagaggcaagcagatctctgtgagtttgagaccatcctggtctacagaggaagttccaggacagccagggctgttacatagagaaaccctgtctcgaaaaaacaaaagagaggaggacgggggagggagagaggaggaggaggaggagagagagagggagagagggagagagagagagagagagagagagggagagggagagggagagggagagggagagagagagagagagagagagagagagagagagagagagagaacaactcaaagctgaaggagacagaatctattgagcctgaaaaaatggaaccgaaaagccagccttcttttttcaggcttaactggaacaaggctcctaatgtcattggctcacccacttcccagaactggcctcttccagtgtttgcttccttttccactctgcaggtggcaagatagtgacaagaccctttgttttcgtagaatgggctcctcttcctgaccagtcaggccggtgtacctacgtcctgattagtgagtcactgatgcacggggattgaaggactgcttggctcaggtcttggtctcatggtctaactttagacctctgcagctacacctaaacattctggaccaaaggcagggagacagggatgctcaaatggaagcaaggtgctgatgccgagtagcccagagccagcagatgggacttgacaacattgccgggccttggctgtacttgcggaggttgttagccatcccaccctctcagctctatgcagtggatgtagctacttctcccactttacagatggggatatcgaagccctaagaaatgatacaccatcatatccagtgggcagcagagctggttccagatcacagtgcaccccactctactccatgttccctgctgcctcgccccacacacccaccactgtggactgcctggctcaccaacaccccgcctctgcctgctccatgggagcagggatttgggtgtagttttcactgggcacagcagatgtacaggtgtgtgactgctggggtcccacagcccatcagccatctgcttctttggcacattgacggtctggacactcggcttcccaagattctacatgtgttgtttctagcctctctctgagctccagccgggagcccgggtcttgacgccacctcccatcctgtctgttgtcccctcctggtgatgccactggcttctggtgtgttgactcattagagagtcagtaccacaagggcaggtacttggcctccctctgtttggtcacggtactgagaactgcgcctggctcacaggccttccagaacgttctagagtctccatggttttgcagctggctaccatcttgctggagctctgggaccactgttcactgttttcttcatgcctgagttacctacccagaggctgagccctgtgttgatatcgagcctctacccctccacccccaagcccctcagacgggtcctctcgtccctgtcctgtttcagggctagcttggttctcttgtttctagctggaatcacagaaaaaggcaccagagtgcccaggtcctggaccttagaaggggacatggggacatggggaactgtcccatagaccccagaagctccctgtcaagccaaagagccctcaagggagcctgcacctaggaggcaggagatgtcagggctagccgtctgcctggccacatgttcccctcccattctgcattctttccctcagcctaaggccacaccctctaccatttcttcaagctctccctgagctccagggcttctctggcctttgtatctatctgttgagcacctcaaacttgatacttcccaccctcctccaggcagtcttccctgactgtccctgccagcagtttctctgtattgttcctactcactaaacctcagtcctggctattgttctgggcttctgaatgggggttgcaagaaaagggcctggggtcaggacatctgggtgcacccttgcttacctctcatgagcagaaggcacctacggacagagctgtggctctctgtcaaactgtagagccgtgagctgtgagcttacttcccagagacccgcctccaggggcctccagagcacccctcccttctctccctaccagtccctcctgtgtccccttgacaagctcacccagaggcagatagcactgacgctctgatgtgacctttcctgaggaacctctcgggggacagggagtggatgtggttgcaagcctcattattcatggcagattttgaacccgtcctgcctcagcttcctcacctgtgcctctcagtgctgctgtatgtgtggctacacaggtaacacaggatggacgttgaggaatgcgttgggggttatgctccctcctgaaggacagtcccgactagtctttgattgactacgggataaaccttagtcccacccattattacccaaatcctctctgggctccattcaatccatgagtaacaacactcgcacatacatacatgcacacacaggggggcacagcacccaggacagggcttctgaagtctcccaggctcctagtctctcattggtcagacctgggtcacatgcccacctctgggccagtcactggagccaaagatgagagatgttcattggctctaactgtgtccgtggaccttgctgctgcagccacactgagccacaagtggcctctgggcacagtggagggctgttactaggagacagatgggagaatattctatgctacatcaggaacaaacctgagcacccactggtgttggggacacaggaagggagaaaactcactgacagagatctgtgccttccgggaggtgacattctggcagggagattggcaggtagactaacaagtggctgaggtggccagtgcttcaatctcattgtgcaaagctgagatgtgagcaaagtctgggtggaaggggctgggaagatatcccaatgagtggccagtgcaaaggtcctggggtggagacattccaggcatatacagagagagaatgcaaagaagggttgagtctagggtgagattgtgaagggtcttgtctttgtgccctttggggactctgtggttttaccctgggtggggtagacccttggaggcttttcagtaagaacaggccttggtttttctttagtggaattctggctgcttggtgagagaagtggaacccactaggggttgtgtcacccatcctgggggggtgggggggacactcctgccaccaaataccttacttcatatccaggtggtcccagtctgtggcaggactctgctcgcagctcatggtatctctgtgtaccccagactagtccttcctcggctccgaccccgtcagctgcatggtccttcctgtactctctacccttcttgtgggacttggagacccccagaggaaaacagccattccaggtatcctgaatgagaccctgaggattccccatagctaactccgtgggccaggaatctccagccacaccaagacctgcccccacgtagagtggcacatagatgcagaagtgtagcggtgtcttcacactcttgggactttaggtgtctccagagatactttgcaaggctgtggggagcctttgccaagtccagtgagaagagaaagggctagacaggctttgaaatgagctgatgagggaggcggtgtgcacagtggtggataggatgctctgagacagacagcacccggtccagaggcattctgtgcaacgattttgaatcttcttaccaagaaggagaaagcagaatgtctcctgtcgttgttaattgatttcttctgtgtccagagagaagctggcacagagccagaagtcatcagggtggggcttgggggggactcatcaaaaatcgacccacggatagctcgggctgacagataattagcccctctcatgccacagctctgcgttgcggaactcagcctctatccggggcaggaagggctccttgagaccagcatgcagagccagggctgggattggagcccagcagatgacatctgcctctgccccacccccatccctatcactgtgatagctaaagaggttccgggagggtacctgcccacctgctgccttttggggcaggaaagactgcggctagaatggaagcctcttaagaaccagcttatagacctgcttatgggcttccatcgtgccagccaaatccagtctgggtctgaaccttgcctgcccagaacctacagtcctgggaaagtgattttagcgatccgagtgggcatgacgtcatcactaggcagttctgcgctttagatgggctgatagctgtgaagtgctcagagggagagtcacccagggccttacaagctgggatcgcaggagtgtttgcttacatgagtcctggctgcaaagctgccactggaggccctgaggagcagcctgtgggaattccctcgggactgtcttacttctacttctgggacattcagtgtatctacattggtgcttctggaggggcccttggcctcttgataagtgtacttttggggggatgaccctaatttggagtagttcaggggccagcaccatggtgagggaatctctctgttcatgcgagcctcctgttccctccagactgggtggcagtgtgcattggtttctggcatcggctggtatcctcactcaggagaacagtgtttgaaagggccctcctgcagtgcacagggaggccgccagctttctttagctccatgggagccactctacaccctcacactggggaaaagaggttcccaattcagagtgtgtatttgtttgtttatttatcgtggtggtagatgctgtgactccgacaggcttcaagcttgtaagtctcctgtctcagcttccggagcgctgtgatggcattgttacctcacctgccatttaaaatgtgtctgaagatgtcgtggattaaggtgacgcccagttgtgggcttgcctagcttgtgcctaccctgagtttgatccctggcatagcataagccatggtggtgcacccctgtaatctcagtacccaatagtggaggtgaggtcattcccggctacatggcaagttcaaggccacactgagagcttgtccccaaaacaacagaaaagagtgggttaagcaaggaaagggataggaaggtgacaggaatggggactgtggcgttggattgaagaagttgggggacagagttggggccaggagagacaccaggcagtcaggagggcaaggttcaggtgctccctgtagtcctctctgggtgcctatggggacggtgagtctgtcttcttggctgtcttgggtagatgaggagagcccatagggggtgggagggtcatggaaggggctgtggaaacccctgcaggagggtgatcactgcctccagagagcattcacactgcagtgggaaagctctgctcccacctctgggcgacgtgtttgatctctcatgcccagctgtctgcaggggaaactgaggcacggtggttttaaatgaccagaccaggaactcaaaagtctgtgcttttagctgtcatgcagggtggatcaggggaggccaccacattggctctctgtggtggtagatgagggttttaacatggcaggaggccaaggcggccagtgtcgaccctcaaggacgccaccctcagtgagcaggccaggtttcccttcttagtgtgtcctcagtggcctggtgccatgactcccttcccagatctctgtggagacactgaggcaggcactgggaatcactcacagtctttgccccacaaaacaacccctctcggggtggggtgggggggggagaggcaaatgttcaaggacactctgtcaacctgtcacagcgcctggtttggaactgggtactcaccgtgcagtgggagaggtgaccacagacatagaggacagaaaggctccaccagcaacaaagagggatgcagactctggggccctcagagggcagggcccattgctaccctggagcaagggacaagaggaggaagcaatccacgtggccccagcagacctgtggctacagatggggagctactggggggagggcagggcgaaggaggaaaaatagccgagctctcagatggcttccagaggtggatgcaggctctgctccctgtggagagatcaagagagtgaacagcacccacccagaccgtccctggtgcctctctaatgatgccaccatgatggctgactcctccttgggggcccctctggagaagcatgtgggtgccctaggtctctgagttgtgtagactttaggtacggcatggccctctagaacctagcctccctccctctgcagaattcagagtttcttccaatctccacccctctagttacctagtcatttgcatcaggcactgcccaaggagcaggggacctagctgtgaccaacacaggcctcatctctgcccctcatgggacatcctccatctgccctgaggaaaagaacacccctgggcattttacagccctggggcgagtgacatggtgacaacagcaggccacacaaccccatgggggccctgggtagggctctgaggtggtggctagcatccccttcccatacctccatagtcaacagggcagacagacaccttcaaggtcatagttatggtgatgtgtcctgactcaatggcacatagtcctcccttctccgccccccccaccccccagcgagaggtggctgagccgctgctcggggaccatatcccacctcccttacccacctttgctggagatacagtctgcctgcggtcaaggatgacagagagaggctagcgtggaatgctctctctgtagtcatcttgtttactccgcaaggtcaatctgatgggaacccttgtgcccaactgtggtatcaggggatgagggccatccatccacggccttgttaaaagtaattagcttggccatggggaaactggggttctcctgatgtttgtgaggacaacaacccccaaggggtgggtctgagccaagaacctgtgaacatacagcccaaagcacccaggaacccaagccttctgctgctggagctggaagggaaggggcaagcaggggtgctggtggcttgtcctttgctgtgtctgggtaggtgggtacacagagctcttgtctgttaagggtttctttactatgcttcagggcagttcctgtgaacagttctgctgccaatctgcccctgagacaatttctctagcttagccggccctgtgttcatgccatcttagacagcggggaaggctcttcttgcccacactgagccttccttgtgtgaggcagcatgcaagcccagcggggcaactgtggtgtcagtactaactctcacctacccctctcatccttcagatcctgagggaagaggggaaggaatcccatcctcacgacaccacctcggcctctgcatccaggaagaagcaaaggaccagcaagccacgccaatggcaccccctggcctgccactatggctgctgtccaccgctctcctctccctgctggctggcagctcggccttcctctcccatccccgcctgaagggacgcttccagagggaccgcaggaacatccggcccaacatcatcttggtgcttacggatgaccaggatgtggagctgggtaagtggctgagctagccggggacacctggggctctagaagaaccatgtccccacacccccatagaaactccaggtgccaggcagttgtgtggagtttgcatctgagttcacacttgggggccttgagaatgtgggttcgtggtgaccctcaagggtagggatctccatcttcccaatgcagactgattccccaatgcctacaacctaaggagcagagagactgtgctcagtttgctcttgtcaaccatttgctctcccaagccactgggccatggccttggctgacagctaagccatcccctgtcccttcccatctgagcaatgccacggcttttgctctttctgctacaagaagcactggtaggagacgccaaaacggaggccaccaaaagaggcttcaagagtcaatctaatgcccggcgtggtggcgaatgcctttaatcccagcactcgggaggcagaggcaggcagatttctgagtttgaggccagcctggtctacaaagtgagttccaggacagccaggactgcagagaaaccctgtctcgagaaaaaaaaaaaaaaaaagaatcaatctagatctgttctggatcacctgtgggcatctcccagtgagccccatctctccctctccgtgtcttctcaccttgaagtcaacgtatgggttcctccccagctgagcccctcgtccttgctgccccatgggaacactcgaccctctgtatcctcagttctccatttgcagattcaaccaaacacagatcaaaaccaaagagtacggatgggcattcccactaatcattagtccctgagcagtaccgtaagacctagctccctgtgtcacggtcatctagagcgaataagggggatacaggctattagcaaagagcacggcagttaatacgggagcctgaacatcatcagggcctgattccccagcaccgagggacaactgtgcaatctgagccacaaatgcaagtgactagagatgtggcttagttggtagagcacttgcctggcatttgcaaagccctgcattctgtctccacccagcactataaacaccaggcgacatggaagtgtgagcccagcactagggaggtggaggcaaacagatcaaaagtacctgactacgcagctagtgggaggccagcctgggctacatgagatccagaaattaaaaaaaaaaaaatgtaaaatgaaatgagtgcggtaatattttgtttaacccaatatgcaatcacctgaagcgtggtcagcagcgtggattccttaagaatgctttgccttcccttcccttgcccccaagagctggcatgccgtatcccaggctgcacagccacatggagcttgggaccttcatacggcacagtgtgcacggtaatgcagcttccttctgcaagttaggtgcccctcctaatcatctctcctactgtgcactgtgaaaatctggaagcgggtgtcccaggtaggggagaagagaatgtgcaaaggccctggggcaggatcaaagaagtagatatggctggagcctggaaagggaggtaaaacggagaccagcgaaggatggggttgtggttgttattcctgaccaggtggacgctgttgaccaggtgaggggtgggccctttcctgtctgctctctgaggacaatggaatatagttggtggcaatgacagagtgacttacagggcagatctttgcaacttgagtctatgctttaactacccaaaagccagccttgacccagtgggtactgatgaccccaagctcagggaattctaagtacagaaacaatggcccagaagcaggcagggctcagagctttatcgacagcttgacatgcagggtgctgatctgctcatggggaaggagggatctgtggggagtctgcattgtgtggcctaggaacacgggtgatttgtatgcagcagggcctggcctctgggcccttgggctcccttcctgtgactgccaagctgttggctctggtggtcaggacacccaaaacagcccacatggctccacggtccagcagcaaagtttaatgagaatagtaggtgtttgttctgccaggtgctgggggctgctggcagggtggggtgggggatactgtgctggcaaagggatacaatattgataaaccacgagccatgtggccccagtgaaggggcagagggatattgggttgggatttttgttgttgtcgtcgtctttggttttgttttgaaataaggtcttgctatagagcagaggttggcctcgaactcaagatcctccttcctcagccacttgagtgttagggagacaggcatgagccgccacatgcaccttcagtgtcattcttagtgaaacaggtcaggagggagtgtgtggcctcacttgagttcccgagggaccccactgctatgctgatgacatcagggacaagagcaggagcagagggtcgagatgtgtaaggatgaaggctcagagcaagctgtgtatacctggatgcacggatgcaggacctgacccagcatcaactacatgctgactttcaggacaatgcccttgctaagcccgaatcgcatcacaacattgaagctgactcttatcaaaaccagtgtaagcaaacaaatcaggaacccatggatgaaataaagaggggagagagaatgaaccatggctgactgtaagtagatacattcatccctctctccatcttaccaatggagaaagtgaggcacagaggtgttaaactacatgtccaggttgaaacaggatttgaacctagaaccatgaccttcgtcactgctgtgctcagcccatttctgggatggatgatggcctatctagagagtgtccatgttgatgcttcactgtcgcaagtactgtcatcagcagaatctgcatatgtgcgtcattgctcacgagagtgagtattctgaaatgtaaatttcagggagccagtcattcgagacaaggacttgcatattctgtgctgtgacagctcctgcccacatccctgggtgacagagattggtgcccaccaaccgttacctcctcgagtgtcttgttgtgtcctaagcaaacaaaactgagcctctgtgaggagggtgggacgggaagtaggtagttgggggcctgactggctttttataaaccagacagacccagatcaataatgcatgcgcccaaaaagcccggcacattatctcacagttggccaccactggcaaaccgagggtggtcctgaaaaattcatcggctgctattttctgcttgtctgtgaggcagctccagagggcctctggctggaggcctctcaacagagctaatcttgggtttccttccagtcccaggtggggacagctgtccacactcatcaggacccagtgagaagggctcaatctatctcatggttgttggttgtggtcgtcttgccttttcgttgcacctgcagttccctggttgtcatttggaatcgttgggtgctgggttcccagagcactagtgactgagcacctgggttgtctgtccacttgcagagagtgaggacatctctaaaaatacacaggaacactagcagaacagcagcatgggcttatgtgtgacaccacagtcctgtcacaacgctgcgctgtgcccagggaagccaaggaaatgctgggttctgccagcactgaccaagttaagtggatgcaggccaacttcagggcatctccagagctcagctggcttctgagagagcccagggagagtcacacatagcctggagcagatctattagataggattgttccatcataagtgttaaaggtcagctatgtggcactgtcagatgggccattaaggtggtgtggggacaggtatctcatcagctatgacagctcatgaatgaacccaggcatggttgtatatgtctgtcaccccagcactcaggaggtagaggcaagaggatcacaagttccaggccaacctggaagataatgagactgtctcaaaaagaaaacaaaatcagacaagcataggtctcgcctctcctggttacaagtgacttcttgtaactcagcccaagcaatgctggatgaactggaaccagcaacttactggggattgaaatgagaagttcaagcgtacttggagtttcaggtgcgtttagatccttctgctcaccggggaccaagcccgagtccgcatccgaccaagaggcaccatcccagcttccgtgtgtctcgccgtccccgggtctgtctctctgtctctccatcctcgcttcaggccggggcccagcccgagagacattggcccggcccgtgcatcctccctgcctaccccgctgtctctgtctccctccctctgtcccaaggcctcctccagatgtcaccggtctctgtgtgacctcatctctaccttcttccaagctggctctgccttcagacagcttgctaagcacttctgtataaaggccagtgcagccagcagggccattagacagcccagaaatctctagcctgggattgaggtgagctgggcaggtttccctcaagggaaactggacattggctctggaggacacaagcagccgggactgttaagttagggggtgttcagcgtttccccacacatctgctgcaggatgatgaaccatgcgaccctcacttgctccgtcatcctcattcactgagcacttgttcttagagaagggtaactagcaacaaagtaacaaactagacagaatcttgactgatgtgcaaagagcaacaaagtaacagaatctttactgcagcgctgggcgtctagcacagctgtgtgtcaataaccaagacaaaacacacaaactaaaagctgggcagtggcggtccacacctgtaatcccagcacttgcagacggaggcaggaagatctctgcgttccgagatagcctgggctacagagtcacttctaggaccgcctgagctacacagagaaaccctgtctcggaaaatcaaaacaagaagaaggaggaggaggagaggaaaaaaaaaactgcatatgacagggaaggtggtgagaaaggatcagaagtcaagcaaagagggaagggagttgtgggggtggggaggtcgtgtgaaactttatccataatgatctcattgataaaggggacacaggatcaagaaaggccagggaacttattaacaggaattctaggaagcacattcaagcagcagtaatagttggtgcaaagggccagaggcatgcaggctgacagagtggcagcactgtgacccagggcacagaaaatgggaagtctgaggcgtgctgatggtgatgttcatcatgtgagggcttgaggctgaaccagggagaggacttgactttctggggagggtggatgtcaggcatacatgggtcagagaagggaaacagtctgacttccatttcactaggtggagaagaggctgactgtacagtgaggcaggtgcggagtctacagctgtccaggcacaagaggagcccagccagtgctctattgcagtggtgcaggctcagaggcaaagctggaaagatgggcagataggtcacaagtaagacctgtggagaacatctccagggactgcaaagctgtgggggaaaggtgatggggttgctcagtgcccccaagggaggagccactccacagacagccatggtggagtctgaagctgagggtgagccttgatttctgaggttcaggcatgtagtggggacagtgggacaaggtacagctcctaggctttgtgcaccttactgggtacacttactggacactgaggccttcaggaccccagctctgacgtccacatcctgcgcaaagcagacccgggaaaggagaacccggcagccccattttccacgttccatctggcagatgaggagactacactcccctgctgaccggtaaccaagggatgggttggaaaccctcggctctcacgggggccagatggcaggcagctagggagatgcacccagattccaggcagcagttcagggcagcttcatccaccgacatccattctgaacattccagctgccactcaccagcgaaatgaaggcgtgtggatgcaggttatctcaggagtggcccatcctgggttcaaactgccaagtgcattcctgcgagggttttctagttttattcgtcgacaagggtgttgaggggcaggttcgtctgaattctagaaagtgtgtcagaattaggcttggctgcttgggaaaatgaaacctagcattgcttcttcgacacataaaaatgtctggggccggtggtccagaattggagtggtagtgtcaagatgtctctagctttctactctgtcatcccttctgtgtcacatctgtcctcgaggccaccttgtgcttcagaactgccacgtacttggcaacaggaagcaaaggtcaaagggcaaaaaagggataaaacagtaaatgaagagcagcccctgaggaccacgccccagcagtcacgtgggatgtgggcattcttacatagtcacgtgatcttgggtttggccaagtcacagagggtttagcgtctttgctaggggtgaacgggcttgaagaaagcatacagggaggctgctgtgccctcaggttagttactggaacccggatgcagagccacccgacactgtcataccctctgcccacacacagagaggaaggagggggaattcagatacaagcctcaatttccttctctgatcttctgccaggacctcctgtgagccaaaaccagtgggtgcaggagtttgttggtgctggccactctctgaggataagggtgctgaggtcaaatgtgattgctggtgtcatacttactagtcacaagagggtcggttgtgggctaggtgcactgtgagacagaagcgggacccactgagaaggaagcaagggaagcaggtgttggtgggcagaaaaggataaaacagccacaacagggtacacaagggacctggtggggacaggacctctagcactgagtggtgtggtgggatctgtgctctgggggcagggcggcagatgcagagccctgtagtaggcacagtctcttcaggatcttggagatgtcgcccaggctcaggaagaagggtagatggcagggagatgtagggacccaggcgagcctaactgtgagtagggaggggctggcttgaggatgagggtgtgaggcagggagaccagctggggatgggggcgggggggggggggggctggtgctcctgagcaggcagctgagggagaacagcagtggaccccagctctccaactgggtaggcagtgcattgtgccaggcagatggtgcagaaccaatcacagtgtcttagctaggcttatctctcactgtgctaataaaacactatgaccgaacccaacttggagaggggaaagtttacctcatcttacagtttgtagttcatcatccctgggagctggggcaggaactggagcagaggtcatggagaaccacacttactggcttgttcccatggcttgcccagcctggagccttataggaatcaggaccaccacctaagaatggtaccacccacagcgggctgggccctcccatattaatcatcaatcaataaaatgccccacaggcttgcctacaggccaatctggtgagggcactttctcaattgatgtaccatctttccaattaaccccaacttgtgtcagttgacaaaaaaaccagccagccacagataggatgcaggctttgctttgcaggtgtctcttttagtgactgggtaactggctctgtgacattccccaaaacctgggccaacaccaacaatccctatgtccttaaatacttacctggtgtggcaagattgctgtgtgtgcaatcttgagcaggccctccctcagagagtggggaccaatcgttcagagttccccctttgataccctgccactgagagagaacattgggcttttctcccagaagcctccacagcagagccaacagatgacaaaggagagatcgacagaatacctgtgaagtttcatcccagaattcagcagctgagtttagtgtggcctcctggcatctctctgcctgattgacttgggggtttgtagcaccagcttgactttggagttccccagagtgagaagggttccccttgacaccatcaaccaggaaaccatacctgagatcttgcaatattcacctggcctctgagaacctggagctgacagcatctagtgcaccatgaacctctcagctcttgcccagatgttgcttctggctgccgctgctttaaccacccccaccaccaccccccaggcctccctctcactccctgccagggacagagctattctgaaacatctcatctcccaaagtgactgttaagcagatgtttctccggtaacgtggcctataggagggtcccctttcaatgtagacattctggagacactcaacactaggtgagggctgccacgtgaccatcacaagcaatgtgacctcaggatggagggcttcttgctcttggcctgagcttatggcctcttgtcccatctgcatactggggtctttgactgctgcagaatggtccctcctgcatctgcttattggtacctttcggcagaagtagaaccagtcaggcggtaggtgcatgctctggtctttctatccgctgccagccctgttccaggccatggctgcacagggaatgtcgggtgggtggctgggtggtcctgggggaggggggtctatcagttcccatgggcccatcaagaaagttagccattcattcaattttctcaccactccagcagtgtctcctggctgaggtggtgctgggttttgaacatgctgggctcagtgctccatcactacaccacatcgctagctctgcattggtcgattggttggcttggttttgaaacaaagtctcgtgaacttgccgtgcaactaaggatggctgaactcctgatcttcctacctccacccccatcacgaacactcctaacaccaccaccacaaccactaccggcaccaccctcacacattcgagcacacacacacacacacacacacacacacacacacgcatatgcacatacacacacacacacacaatcgccgagattacaggcacatgtcaccacctctgtcttttttatgtggtactgggaatggagctcagatcctcacgctggcgtggctggcgctttacccactgagccaccacggcagcccctggaaccctgatcaactcactgtagtcctcttcatgattggaaggaaacatttccagttaagggtattaatgtattcaccttcattcccacatggccgcccagccacagtgcttagcacttgttacagaggcaagagcccacagtgtccaaaagtcaagtgctctagaagcctctatgacatcccaggaaaacgtcctgtttttccaaataccggttgggagccaggttcctctgacactaagaagacatgactaagactctggtggtctgactgtggccttcaactgtgactgccctgtgttattcacaagcgcctccgtctccacagagaggcctgggtccttgcccaaaggctctcactggaacagcctgtgctgggttatctgtgcctaagataaaagcagagagggaaggccatgggcattcccaggaggccaggggccacacccactgacagcctgtgtgctcagtcctctgaaacagctcttggaaactttgaaggaactcaaagcgaagataacccttcctcccgagtcatggagataagtgaaggatacagtgatcttcaggccacccagcaggagcctccaaggagatactgtttggaaaaacctgaatgttatgaaggttggagctatggcagctggtcctgagacagggacgtgcctggcacgtttccactgtggctagaaggctagcccaagagggaaaggtgggattatcaggacaatactttccaggtcctttacggttctatcagccaaaggtggatgccttagttaccgtttctatcactgcaacaaaacaccaagactgaaaagcaagctggggggaaagggtttattcagcttacactttcacattgttgttcatcaccaaaagaagtcaggacaggaacctggtggcaggagctgatgcagaggccatggggtggtgctgctcctcatggcttgctcagcctgctttcttatagaactcaggaccaccagcccagggatggctccacccacagtgacctccccccccccccacacacacacactgatcactcattgagaaaatgcctgacagctcgatctcatggaggcatttcctcagctgaggcgccttcctctctgcctctagcttgtgccaagttgatgcaaaaccagccagtacagtggactttgccttttgctctgggtgaagcaggtgttcagggagagtgccagaaggattgtgacgacattgcttaatttgttagaaattgctctccgtctgtggagggaagagcagcacagaaggtgacgtaagcgtctactgcagtagtccaggcaagagctggggtgctcacatgcagattagcgtcaagactctgaggttactaactcgggttgtgtttgtcccccataacaatctacctcccaccactttcccaaggaggccccaccctcaaagactctgtttccccacaatgtaaaacaagcaagcataggccggcatcgtcttagatacctgtccaaagagcctcgggagtcgattgcacggaggtggtgtacaccccaccccaaccctgggtagcaagtctctggagaagggatcagtcaagagttgcttcagcaccaaggatggcaaaagtcgttcatgttttcaatcctcagagcccctgggctggaaagatggctcagttgttaaaagtgctcatagcacaggcctgaagacccgagctccatccccaatgcccacagaaaagccaggaagtgctggagaggcagaggcccactggccccctagtcttctcacactggcaagccctgggttccatcagagaccccatctcaaaggacaagttaggaagcagctaaggacacccaaatgtaagctgatggctttcctatacaggtagacccacctgtacgcatatccacatgtgtataaaaggaaggaagtcattctgcagtatctgctaagtccccgtagatggctggtgcctactcaggtctttacaggagcaaatgaaactggggctcggtgcagatttcttgtctagaatgttcaaaggcccgcgttcaatcaactactctgtaaaaataaacacaagctaattcagcatggtggtgccagagacagacaatctcacatgctagatcaacaaacacagacttttagtgtgtgtgtgtgtgtgtgtgtgtgtgtgtgtgtgtgtgtgtgtgtgcgcgcgcgcacgcgaacttgcttcatagctgagggtggtatttgatcctcctgcctccgcctctcaatgctgagattacaggcagatgcccagaggacaaacagggcttttccaatgcttagtactccaccgacggatctccagcccagcccagtagtaaacctcggctctactgcctgcaaattcattgtacaatgcatcaaaaaataggcagtgagagtgttccataatgttacttccgtggatcagagagtgaagggtttcatcagataaaggcccacccagccagccagccagggagatagctcagttggtcaagtacctaccatacagcatgggggtggaacctcagatccccaacacccgagtgaaaaatgcgtatgtggcacacttatgcctacctgtaaccctggttcaggaggagggaattgggggaggggagcagagacaacagactctgcattgctcagtggtcatcagttttggccagtcagtgggctctgagttcaatgaaaggtccagtctgaaatggtaaggtggggagcaattgaaggaaacaccagccattcatctcaggcttccacatgcctaagtgcccacacatgcatgcgtacacacacacacacgtgcacacacacatacacacacaaatcacacaagtagtgtgctaagcacccctatgtagaattcacaagaagaatgagcagttagtgattgtagggatatttgacagtcagggggttggggtcctgaagtttaagtcccactgtgaaggaggggagactgcccatcagaatcacaccaagagatgtcaggctaacctcaccctggccctgtgttgtggcaaggtttggtcaaggaagaaaccaagcctgtttttgtctatatgtccccagatttgtgttggacgacctaagtttgggttggctggccgcttcacaggaaacatgaaagctggcccctttccctgtgtgtggctatgtcttcctggccaagggccattagtcctgggagcccttaggttgtgtgttttcacattacagaagtgggttctacagcctgatgttggggccttttcaataaagtagatcactgtctgcaaaggaggcacaatgttcagtgcttttccatgcaaccccagctgtcattctttccccagaaccatactcctgagacttgcctgccgtagctcttccccagtaggagctgccaggcagggagagggcatggtgctgccaagagaaaagatggaaccctgagctttcagccccaaaacataagagacggccccaaagcctatcggttttccatcaatgaagatttctggggttctttcctgagcttccagaaggggtctgatggttaatggaaccagctcgggtccccagaggctgggcacctgcagacagctgttctgttctctctctggaggtctgtgaaccatggagggcctcttccacccatagcacaagggatccatgtaaggaaaataatggaggagaaaaatactatgaggtgggccccagagcagcagaactacagacgggggcaggtaggatggatggagggagggtgggagacagccacgtagggctacaagcccaaaccaaggaagatagatgtatggaacagtgggccagggaagagaacacatagccaggatggtgcctctgggaacctttggaagagctggtgtgtgtgtgtgtgtgtgtgctgcatgggtgctgggaaccatattcacacagagagaaaagcgggactggggttgttagtgagtttgaggacaaagtggaggtcctgtggctgtgtaatggttagaggggtgttacagtgggagggtgctgactacacccctgggtgtgtcacccaagtgagaaatagacctagcccttgggagaggagctattgcctgcccaaaaggagttggcaaggtctgatggtctatgaatgcagaaagcagtggactggctcaccggatggtacagcatttcaaatgccggccccaggaatagccaggcgttgtctgaatagctgaagggaagagaagcttgactctgatgtggcccaccaggtatcagtagagaggcaggtggcatcaagggtggaaaattctggcttgcatcatggtgtttgccagactctaggattctgtcccctccccagttctaatcacaaccccactcctaacaccaccagacagaaccacactatagtaaccggtccttcctacccccaggagaagctgacacttgcttcaagtagaggaagccagttaggatcaccggccctcaccactccatgaactgtccctgtgtgtgaacaggcatggacatcacattcccctggagccacccaaaggggcacctctgggaattggaggcacctcacagcaccccatcaatgtcataataagagaatacgtctgagctgggcgtggtggcgcacgcctttaatcccagcacttgggaggcagaggcaggcagatttctgagttcgaggccagcctggtctacacagtgagttccaggacacccagggctatacagagaaactctgtctcaaaaaacaaaaaaaaaaacaaaaaaagagaatacgtctgtccccaaggggcccaagagtcattcaaaggcacagggatgctcagcttccccaggacaccatcaccaggccttggtgaaggtgacagtcactgccctgcttctgctgtggataagcctgggtctgagctcttcatctgccaccttccccactgtgtggccccatccatcaccaagtgccccagccgcgcttcccattcagaaaaggacacttggaaaaataactttgcatgtcgtgtatatagagcaattgacccacgtgttagtaattagaacaattgtgagcattgctctccaccccagggacaacccagtggtcccaaagctcagaccaattagcgggctgtaacacagagacttccaggcagggcctgttggatacatgtgatctaggaggtaacgctgacatccactgcagactatgctgtggtatggtgctcagcaaacctcagagaacccaatatgttcaagctaaaagtcagagcttaaaaccttaccatgcaccgagcgtggcggctcacgcctttaatcccagcactcaggagttcgaggccagcctgacttggctggatatagtggcagtcaaggatgaaccctcaatgcttggtgtgggtaaagggcctatcacagtcatttagggggatcagaagcccaggagctgaaggtccagcatatggagggtcctgaagctgtttatatacagctctgttttttatgtccaggagctctgtttatgtacaaaacatggtttgaatctagactcaaggtacttcaaagtaggtttgtacccagtacaactgtctagggggactgagaccagggcctttctggttgggttggcttgggagcagggtctggcccatgcaagcccatggatttcctaaggatctggggagtccaggagatggagagcccaggatataaagggtctaggagctaaagaggcacaagagctggaagtccaggagctcttaggcagataggttagctttaagggtagcgagatatagacttcaaatgcatacaggaggcaccctagatgaggctacaagtgtagagagactggctggggcttggctagactagacttcagttcagtggataattcttgggaaacttctaaacaaaacgaaacctaattctatctgcatttgtgactgctttaaaaaaatctgtgtatattagcactctgaagaaaagacaccctgtttatgtacaaaatagggtttgagtcagactcaaggtacttcaaagcaggtttgtacccaacgccactgtctagtggcactgagaccagggccttcctggttgggttgtgggtgaggagtatggcccatgtaaacccttggatttcctaagcttgcccacagttccaggctcaggattggaagccccttaaagagctcccccgcccccccccaagcaggccacatgactcaccagtaccctctgcttgcaggctccatgcaagtgatgaacaagacaaggcgtatcatggagcagggcggggcgcacttcatcaatgccttcgtgactacaccaatgtgctgtccgtctcgctcctccattctcaccggcaagtacgtccacaaccacaacacctacaccaacaatgagaattgttcctcgccctcctggcaggcccagcacgagagccgcaccttcgccgtgtatctcaacagcacaggctaccggacaggtgaggaccagagtagggcactgttggggcctgctcaagggacagacaggtggcctcttgtgccctcagcttccctgggtgcgacgtccacactgcactggtccccaagataactctgggttatgcccagaaaaggtttcacttcccagtgaggtttccagtttatttctatgcacacatagtagatgtgtctgaagaaggttcagaaaaccaccttttcaaagaaactagagttttaaaaaaatggagagtccagggagattgtgaattctctgacagggaggtcacgagatattccttgcatgcatgagtttgaggtttctgtgtttaaaactgatttattgactgagaccatctgcatgagagaaggttccagaatgttgaggttggaattagagaacggacagacatgggggactcaccagtttattgtgggagtaaccaagatgacgaaggggttgccatggtgagagagacctttgactgtgctgttatttgtgtcaggatgtccttgttgcctacttgagggagacactgtggcgagttcgaaaggccgcccgctaggctggcacctaaggtcaagctgtaatcccagcccagccacctcgcccttgccaaatcctccagactcaactcattgaacttgcttgagtttgaaagaaaaaaaacaagaattccccaccttggcgagcagcctggggctgttgtgaaaccagatgatatggctcaggctcagatgtcgcaagcccgtgacgctacattgttttgagtgggagtgaggaagggccgggcacctcctgtagctgatctgcagccatcatccatcagggctgggcaggctttcagatgcccagtgggagtgggtgggactgtgtactccctacatgctcctcccaccacaggatcatccccagaacaggttcagctataaaaaccagctcccctacatgggcaggtcatcatgggagtggaggtgcagaccccgatggcttggggtccccacagaaagcgcgtgttagaggtctcgtaggccagtgcttcagatggttgggaagcctggaacgctgttggggtggggataggcagggacatagcaaggcggcggctcctattggagggtgcagctgccattcagggctagaaactccatctttaaaaactgaatactgtgggccaaagatgtatctatgggccggtatggctcaagcaccctgaacagctctggctggaatgtttatatgaaaacagatgaataggggctggagagatggctcagtggttaagagcaccgtctgctcttccagaggtcctgagttcaattcccagcaaccacatggtggctcacaaccacctgtaataggatctgatgccctcttctggtgtgtctgaagacagcgacagtgtatgcacatacataaaataataaatccttcaaaaaaaaaaaagaaattgtttaaaaaaaaaaaaaaaaagaaaacagatgaatagtgaggcccccaaagtgttcatcaggcctgtcacctggaaagcagaaagaccactcctcccacaaagactcctgggagaaacatgaaatggaaagtttgtgtggcataatcaaaacagaaaacagaggccacgggaacgcagagacatggggacagtccgtcaaacaaaaggggaaattactaatcccaaaaacactatgggatttatgatggagcgaaagcccatatcagagtcacatgggaaacagaaagaaaggaatgaccatcaaagtagacagtcaccaaaccaggtgcgccatccagctgctggggaggctgatgcaggaaggtcataattcagggttactggggctaagcagtgacactgcatctcaaaatgaaacatccaacgtggactgaggatgtagctcagtgatgatacttgtatggcgtatgttcattttttacggtacaagccccagggacaaatcagtactccagcctggttgtcggtcaaaccctatatccatttgagcatctaaggaaggtaactgagctgagtttaagtctggcagagggaatgggggtacctgctgcttatggctctcatctaaattcattgctgtcttggtggccttgatccaagagcaggtctacagatcaggttctcgtttctccttacttcccatcggtgagaaacaagatatgtgagtgtgagcactcgtggctgcaaaagagcctgggatatgtagtctttacgctgggtaggtctttgtaccactgaaaacagatcctgaagggggagaccctcagtcacagccacagctcttaactgttcgtgtttgtgacgcccttgaatccagaaggtcagctgagcttaaaggacagatgccaaaattcacagtgcagggggatgttaacagagccggtttaaaaaaatgaagctacagctgggcttagtagtacaagcctgtaatcccagttcccaggatggagtccagagggtcaggagttcaaggtcaacctctgctatatatttagtttgaggatagccagaaagggaggaagaaagggaggggtggagggagatggggtaggagagaaaagaaaagaaagctacctggcctgatactgcatccctgcatttcccaacactaagggattcaaaaacaaaaatggaacaaaaatcgggatgggagagattgcacagcaggtgagagcactggcttttcttctagggactgaggttcagttccctgcacccacgtgtcggctgacaaccacctgtaactccagttctggggcatctaacaccttcttctgacctcctcaagccccatgcacacggatggtacacattcacacatgtgagcagagcactcatatatgttacgtgattaattcatattcatgggagaagaaaatacaaaacacattttgaaaataacttactttctgagacagagcctgcgtagtcttcccccaagtcgttgagtgtctagggctggtctggatcttttgatccatctgcctccacctcccaaatgctgaggtgacaggggtgagtccccatgcctggtttatctgctgctggaacccagggctttctgcatgccccagggcactttagcaactgtgtcccagctgcagctgcagccccagccctagatgtaacaaagctttggctctaactgcaatgggttgacgtttgaagtgcataaactgtgcagtccctgttgagaagagtgtaatttgtgccacaatcatcagattggtgtaacatgatgtcccttcccattggcgtcctccttttacagggatctgaggatggcagggggtgcaggaggtgtctttccaaagactccctctggccctgttgacagtcaagtctccactgggttgtgtgtgttaccttgcaatcctgtgtgacagacatgcttcactgagcccagacaccgacttactctctgtcccgggcccgtgtcttctgatgccacttcagttaccttgcatcccgcctctcttaaaagatgactattcagtcatctcacactgcgactgcacagcccgtgtctgcgagggacacacaagagcaaaagccagaggtgctgggtttcagtcgaataaatacccattggttagtggaagtttctggatatggctcccgtccaatccgagactggtgtgtctccctgccccctcaacccaggtgagccaccagcagccctagctgcgctgacagagagagcgcatgcgtgttcccagcgcccgattccctgacaagacacagtgggctgtgggggagttggagtgccagtctgatttccaaacactcctccctgggggggtaaagagccttttccagcactttctaccaattagatgccagctaaggccttctctctccaccaccagagtccaaccccacgtggttacgtgcctgccaggcttccgtagagatggtagtgccccttctgcacgccgcctacatgttctggaatgttcctggggagctgagaacaggcctttcgttagaagttcaggctctgccaggactcccctgggggtgctgtttttagactgtaccatgcaccccactttctttccgttcctctcacatagctgggaaaggacactggctgatgacttagattctggtcattcactgcctgtggccaccacacggtagccttggtgtcctgatacctgcagaggccctcacatggccaggcctggcactgggcaccctgacagtcgctgctactgaaggaaggcattgtgtgcatgtgtgtgtgcatatgacttgttttgcgtcatgaggatgcctcccgtattaccttcccccagtgaccacccctctctcctacctcctgtcctgccatgagcccctttagaccatgtccagctgcccaccgacatctctcttagggtccccatgtgtcaaacctaccatgtccagtatgacctcttcattttgtcacccccttcctagggctgtgcacaggctcccccatggcacttccaactttccattcactcaggccaagcccgtgaaaccgtgtttgacatgtttcccttcctatcacaagcagtccatcaacagaccccatcattcttcctgaagtatccgctgagtccctccattgtcttcctgtcggcccgctcccccacagcacccccctccgccaaccagccgctctgttcccaccctaatcctcaaggtccgcccttccccatcccccacccccacagcaaacattgccatcccatcagaacccctgctgctcttcagcatatgccccacccactagggatggagacccgccctcaaagctgacacagggtccccaggagctgtcccacttgtccagcttctcttggcctcctctgtccctgttagctgtccctgctagccactccacccacagggattccttcctgttgctccaacagtgggcctggcacacgcctccgggccttggctcctcccttcctctaaagcagcgattctcaacctgtgggtcgtgacccctctgggaggggacacctaagaccatcataaaacacagtaacattatgatttataacagcaataaaatcacatctatggggtagtagtgacaatatttttatggttggggggtcaccaccataaaaaagggtcactgcattaggaaggttgagaaccacagctctgcataatcttcaaaactcatgcaatgcttgcacgtatttcctcagatctgtgttcctgtgtcccctcctcagtggaccctctgtgaacaccccagtaccccatcttcttactcattttcttttccttcaaagcctgacaccacccagcaggatctgtctgtttattctgcagtcccttgggttgttagccttccctggcctgtctgtgctccctgccttccccggcctgtgctccctgccctgattcttgcttcctctaacccttgttctggccctttctcccacatggcttcttgactgtctggcttctaaactgccaagtccctcctgcgtctcccaggcccaagacagcctggcccacagtagatgcttgaataggttcacacagcctggcccacagtaggtgcttggttgggttcacacagcctggcccacagtaggtgcttggttgggttcacacagcctggcccacagtaggtgcttggttgggttcacacagcttggcccacagtaggtccttggttgggttcacacagcttggcccacagtaggtgcttggatgggttcacacatcagcccccatcacttcctctcccggcatgggctgcttctccgttatctctctgcttacacaggggagactccggctgtcctggatgcttttctggaccctggtgcagctgtccccaccttcacaatggcagccttctctgcccttggccttcctcctgcctgtctgctgccggcttcctttccccggagtgcacacagggacacacttgagtgtgcacacacagctctcttcttcacggtccagctgccccttgtgtgcccacccacccacacatgacccttatggcctgtggctgcagagtccccatctgccccccgagtcttggaacctcccctgaaggacttacctctcggcatgggggtctgtctgggccttgcctgggtcatatagcccactgaaggtccagcttctcctgccacatctgtctctcagatccggctcattgtcctttagttaagtcaagcatggcggcacacccatgctctcagcccacaggcgtagtggagggaggaccagttgttcagactcaccctcatctgcgtagaaagtctgaggctagcctcggctacctgagaccgtttgacactgtggttctcaacctttcatacactgtgacattctaatacagttcctcatgccgtggtgacccccaaccataaaattattttgttgctatttcataactgtgattttgctactgttagggattgtcatgtaaatatttgggaggtaaaggtttggtaaaggggtctcaacctatacatgggttgggagaccctctgatctaaaacaaaatggctccggtagttaggagcggttgacactcttgcaaagggactggctttgggtctcagcactcaccgggtggctcataatcccctgtgactccagttccagagaatccagggccctctctggctccatgtgcaccaagcatccatgcagtgcacgtctatacatatagatcacagatgcacataaaattaatctttttttaagtccccaaatctccttaagcccttagtctctagcctttcaatgcttttaagatttacataagtgagtcacccaggccctcgctctaacattacttgtgactgtgagctgggacgcttccctgatgctcagtttcccttctctacagcagtgttacgatgtggataagttgcccagtgcccataatatgcatcaccccaaggacggtgtgaccaggtcccacaaattcatgcagtgaaagtccttgggagggagaggaagcgtgggggctgggagaccgttctgtctgcagagccatcaataaacgaggagtttcttccccgggacccacagaaaaggccaggcatggcagctactgcctctcacgagccctggagagacagagacaagagagtccttgggaatcactagccggccagcctagccagttggggggcttccggttcagtaagagatggcttgaacactaaggtagagaggcaagcaagatgcctcagcaggtaaaggtgcttgccgccaagcctgatgagatgggctgcagaacccacccagtagaaagagagaaccaactcctgcaagttgtcctctggtctccacacatatgctgcacccacgcacccccacaaacacacacacatacacacacacagataaataaatatatatttttaaaaagttaccaactgttggagaggggggctggatgattgaggaagatactggatattcctccacactcccatgtacaagtatccttacatacatgtacatacatgaatacatatgtatgcatgcacacgccacacacaaataaggaaaagtggagtaagcataggtgtgtgtcctcagtcccctgaggatgaggtatgggggtggggaggtccaggtgtccgtctgatccctgactgtccctcagcctcgctcagccacacacaggttcccgagaactgcagagacccagagccacaacccaggagcttaaagcaggaggtgcttctcctctgacatcccaaatcggctgtccccaggggacttctgttccagcctcctcagctctccatatcccaggctccccaggctctgcctctctctcctcgtggctctcagatccaggcatctgtgtccagatttccccgttgacagcactggcctgcagttccccctgacccgatcgatgtaagcttcttttaacttcttttaacttgatcacagaagctagggctcagataaggtcacacactgtgcaggtaccaggatcagagtgggtatctggagagtcacgatatggctcatgtgttcaaccccccacctgtcactgtcctcccttccagagccaccctcaggcctgacttcagtagacatgggacagaagaaaggcttcagtgcccaaaacctcatgttttgtttgatgtttgaaacaaggtcttcttaggtaaccaggcggcccttgaacttgcaatgcccctgctagtacctccccagtgctgggaccacagctccatgcctgcctactgggttttaactctgcaaacaggaggctaactcacaccaactcatgggagggagggcctcttaggcttcagaccacttaattgcaagcctttttctcaaggaagcacagcgccccctatgggccaaatccatgaacacagtgatacaggatgctggctgtatcctgaatgaagcaagggactttggtggacgctctgcagtccacatgccttctacactaccctccaagtcattcgtgtgtggggggattattttatgcttattgttctgagtattgaatctgagtctattttctatataaataaggaaggggttttttttgttgttgttgtgggtggtggttggttggttttaggtttttggcagttataaatgtgctcagtttcctagcattagatctgacaggaaagctgttataattgaatgtgaaacttttccaagagattccttatttctgaaaattctgtccctgatggcaggggcaaccagtatttgaattgcaaataccaagcgcccaccagcctgcgctgggaaccagcagcctcccagggaatctgtctccttgctggcacctgactgccacctcatgtctccttgacggatgtgccagagacgtttccggttgaagcctccctttgttataaatctcccagcttttatttttcttgaagattgctgttctaatgttctttcaactttgggagatgactggcataggaaattatttttcgactgtgaattccttttgggaggaaatacggcaaactcattattataggaaagggccattggtgagatacctctgagagcagctccgaggggtctgatatgtcacgctccctgaggtaatgggaatttcctatagttgatggatcctccagtcctgctgtaaaggctgctgtggattgtctgcccctctgccccacccttctgcacgtctgcagttgagagggcagagggctgggaagatggcttagtggggaagccaacaaggaccaggcccgatccccagcatcctggtaaaaggcggggtacgaatgcccatctgtaacccagtctccaaagaagatgaaatccctggaacaagctggtagaactggtgaagtcggggttcatgtgggagaccctacctcagcatataaggtggagaataatccaaaaagatatctgacattagcctatgctaatgctcacacacacacacacacacacacacacacacacacaccaaagggatgcacacacacacacagcccacaccacacacactcaccacacacacacacacacacacacacacaggaatgcacacacatacacatatactccataccacacacacacacaccaccacacacagacactacactacacacacacactaccccacgcctgcacaatacaccacatacacacataataccacacacaaacaccacaggcatacatacacacattaaaaggaaagggccaacagtatagctcagtcgggagagcactcgcccagcacacaggaagccatgggtttaatccacatcacttcataaaggtgtgggggtgcacacctataatccaagcattggaaagctgaggcaggtttgagagttcaaggccagtttgtcctgatagtgaatcaacaggccatagagcctctccctgatgctagctagcctccctcccagctaacgaggttttctggaaatgaatggactctgtcatttgctacagctgcctgagtctggcaggggaggctgaagcctgcattcagttagaaactcaagcaaccccctccaggtcccctgcacccactgcccagccttggcctgatgccctggggtcctctgcaacccaagctctctccatagcaacagtcccactcggaacaagcaggtaggaaaaaggagcctagaaagggctcagccctcagtccttgtgagctgcctggcccttctttcccctggtgactagccaaccacccctactccccaaagaggacaacagggggtgccttgaaaagctgcactctgattgaaaccctcccctggctgttctgagttcctgagataaacccacagctccttctatcgggctcacctgttcacgtctctcctgcctctggctcttctgttccattcatacgcgggccactgaccctctctgtggtacggtcatccctgccctggcaccttagtacttgcttctgtataaaacacacttcacccactcccctgctgtggagaactttccagatccatcctcactcttccctggggagtcagttaccactccctacccagtcccagttatacaaagatgagtacttgaacacctgccaggcagagacagaaaacaggcatccaccactgaaacctagtggtggtggggctggggatgtggctccgtcgggagctgtgtggagggctctggatttagccctcggcacctcataaaccaggcatgctggcacatgctggactctcaggattcagaagggagaggccggaggatcgcaagttcaaggtcattcttagtggcacagctatttccagaacagaccgggctgcaaggtgccctgactgaaaaaagcgagggagggagagagggaggaagggcaggcagcagagatctctcttaactagggaggctgcttttcggcagcctctgaccctctgcatcaccgccatcttcctctgcctcacttacctctcacatgtcagcatccggaatgtaaccaaatgtagcgagttgatttatcttgtgctttggcagttcaccattcaaacacaaagagagccctaccgtaaccgtgagagaggcagccttaagtgaaacagagccaccggcagttctcaaaagctctcggcctagcctgagtgggactcgggaggtttatttaacatacttccacccctgcctcctcagcccagacggtttgtctgccaaaaacctgaagacttcaggcctgtggcctctcacacgtaatagctatagcagcctggactttgtcctttgtccaccttcttttgtggctcagatccccagatcccccagcctagtgggattgtctctgacactcagaccagggacctccacccccccaacccgtagcccccaaacccaatggcagcaggtcaaagctgcccagttcaggatgtttctagaacgacaggtgccagggatgggatctgaattcctgggtctactgatcttctggttggtatttgttaacgtgcaggtgacaccgttatccaaaacagctcctatagggagcagatgaatgcggaggtgtgcttccttcctgtgacagcataatcagaagtcacacgcattccatacgctgctgtaggttgtggaagaagatgcccagagtcacaaaggaagccagttgcatccaagtgtcttagaaactgccatgtgtgcctctttccacatttccaggtcgcatcactgatggtgggcaggtctggtaccagaagtgatatttcaaatatccatggtggctgtcttgggataggtcactggtgcctacgtccaggttctgtcagtggagctttccctcaggatagcagggcatgctagttagaggttaaagaaaataaacgcacatgaattctcccacccaagttcacagactgcctgaattctggctccaaccagcagattaggaaactcttcctagagctggagagatgactcagtatggttaaagggacgagagagaattcagttcccagaacccaggtcaggcctgtaagtcaactccaggggatctgatctctaccacaacactacattcatgtacacatgcatgcatacacatctgtatactcatacatacttgcatatatatacatacaaatatacatatactcaaatacatatacacacttaatacatacatacatgtacatagagacatacagacatacacaaatacatacatacacgtatatgtatatatacatacacacatatacatacaaatattcatatacacaaatatatatacatacacataatatacacaaacatacatatatacacagacacacacatataaaaatgaaataatttttttcttttactcttgaaagaaaagaaccaccaccaccaccaccaccaccccgcttgctgtggcacacgagaataatcacttgggaggctaagagaggagtatttcaaaatggggttagcctgagctacgtggtaagtctggtctcacagaaaagaactccccctagaatatattagaccccatagccatctcgtgccactagaatactcagcagccagagtcctccatctacccctccccttccccctgagccctgtccctgtgtcttgcccacatcacgtccacctcagtgaacaactagtgcctcagcatttccacacctgctctccttactcctgatcaggcctgctcctgccacggtgtccctgtagattcagcatccacacatcacacgaccaaggcaaaaggcagactcgaagccctgcaggctcctcgttagaccggtgcccacagcctccgtggcctggtgtctgtaggggctctcacccctctgctgcccaaccacaccccccacaggtttgagggcttgctcatgggactgtcatccagacacaggacgcagaagaaacagaacaagagagccttttcctgcctcttgagctgatattcgagttcagttgcaacaacaaaagctgaaacaaaaattgcaaattgctgacaataccatgaagaaactaagtcatgaaggagaggcccctcgggggtgacccagcaaacctctggcaaagctgaagaatggagccagagcatctgcagtagagaaggtcttcccaggacaagcaccagggcaaaggacctggggcagaacaggcgctgcctgactgaggggagagctggggaacagagtctgtaaccagtaggagattgttacgcaggcgtctacaggctgaccagactctgggttttgttcaagtgtgacatgaagctgatgatggggtttgctaagtatggtagatctagactggtggcttagagagtgtctctggccaccatggaggagggaccgagggagaaggcaggagggctgacgaggggactccagccacctccagacagagaaactgagggtcctatcctggacctgtgctttagacagagagagctgccaggctgtggagacagtttggggcctgagaaggagattcaaggtgtggcccttctgaccagagcgctgggtgaggagcagactgggggcagatgggaggccatactgggaaacctgcttagtgtcaaatgagtcagtttgcagggaaataagagcacaaaaccagagagtccattgaaaccagcaaagcccatgcagaggcagtgacagctggagcagagagctgccgtgtggggtgacgcccggttctgttcccccggagccctcgagtgtggagctgaacagtctggttttggcaggctggacttgccatgttctgcctcattcaccacagaccttccccattcccctggggaatgttgtttattgtcattggctgggccctccatcaccagtctctgctaatagatagatgtacgtctctctgggcaggcgtacttacagtcccttccttgtcccaggagactctaggccaagaccagtcacatctggtttcagacaaatgttttcagttcttgaaacacacacacacacacacacacacacacacacacacacacacacacacattaaaagagtcgggaccctggtttctttggtgttcttcccatgagctaactgtggctacactggtaactgtcccattggttaggcgcagtcaccaaggcagagtagaaggctcttgcctgagactagctaggcctgcatgctctgagtggaaacgaggtccttcagactctcaggccacacccttcttgactataggccagtgtgaatattgggagatgtgattgtaatccccttcccctctacctgacagtgcccggaacatgtacccacatcgtgacagacataacttcatcactgtccccagggaggtagcgacacccctactggccccactcaagttcatagtactctgcacacagactgcactcggctgacacacacacacccccttcccctgcaccccattcttgtcacagtgctcttacagatactaaaatagaaagcctttgggattctggtttggtttggtttgaggtttattttagttactctgtgtgtgtgtgtgtgtgtgtgtgtgcgcgcgtgtgtgcgtgtgtgtgcacgcgcatgcatgctcgtgtcacagcatgaaggctgaggacagggaatgcctcacagatgtcagtccactccctcccctgcatgggttccagagactgagctcaggtcatcgagttggcagcagatgtctttacccactgagccatccttccagcccacagaatgcctttagaatacggtacctgcccttgcgcagggtatgtgcatcggcctgaatacctcagccagatcgatcctgtcagctgctggctcatcacatacccggttttagcaggtgcccactggggctacagtgtccagacgggcttgtgccctctggacttgcatccttggtggaggggagaaacatataggaaagtgggtgcctcagtggggtgatcccagagaaactgagaagaagtgaccctgagtgcagagacaaaggggaaggcagggtcatcttgggtcagacatcacatggagaaggggcaggtccgtgagaccgacagaggggtgtccaaggcagagggagcagctggtgtaaatgtcctggggcgtttaagatgctggaggtcggaaccctgtgagccaagcacaagtcactgtaatggagtcaatggtcttgaattcagaggatccttctggctatttgtggatgattgattctatgaggagacaagaggggagggaggctgaagtatgggggtgagtggataaggtgtgcacatgttctctctctccctcccttcttccttcccctgaaaggtcttgtatgcatttaaaataagcattctaccaatgagttaaaccccagtccctaaacttctctctctttgtggactgtcttacccagtgggctgacatgggctcaaaagagccaccaacttgggtacagctcctgaacaatggtttcctgctcgcttcttgggacagaacacccttttctgcttttaaggtctctcacctcaaagtgtgaaccacaggtggaagatgatttcctgtgctccagggacacagcagggcatgtaggctgacaatagggacctcagcgaccaaggcacagaagttggggcctgtggcttgtccagggttacaataaagaaggccaagaaagaggaaaccttggggatgtgggagtgaattgacttcacagtatggaagggacctgcccacgaaaataagtctttaatgaaatgtcagccacacaccgtgtgattcagcgggtccgctccggaacacttcgcctccttcactgttatttaccagttttgttgaatgttcgatgtgggtggaggtggtgtagggtgagcctatgccaaaattgctgttgtccttgaaacagccctgttcacagctctacccagatggccagggaccagggagggaggaacggtctgtactacactgcaggctgagctagccctccaggcagccctacagcagacctcaggatatatctatcaccatctcatcttcagtaggtgcctggcctcttgcacagcagtaaaccctggtgttcagccgtcaggaaacaggggtgatgccctctacatgtgttctgcaaggggctgacaggtccaaggtacagatgtggtcactctgcaggcttgctcttatccattctgtcacatgcctcctgcagcacagggtaaaaggggagcatgcacacatgcacacgcacatgcacacacccctgcacatacatgtgtgcatgcatgcacacaccacacacagttgccctgagattcccattgtatcctccactgccctcagactcgcagcgatgcctcccaggctctccgatgccaggcatcctgccagctcatttctatccctgatcgccgcacgacacagctttttcagaccacaaacacattgttatgaggccatttgagtttgtttcagagctaggagagataacagaagggtctgggcctcctgtcaggcggcgaatggctccccagcagcccttaacgcagacaagtggagcgagacagccaggaggggaggcgcttgcctgcttcaaatgttaagcaatggacagggcagagggaaggactgggggcctgatccctcacagaggaaggtgagcacacaggtgatttcccatatctggcatcagttaaaccaggtgctaacaggcgagaggctgataaaccaggtgctgacaggcgagaggcagataggatgcagatagatgcttgttacgatgatagtttaactttaggaacttgtgtcgtggttttttttttttttttttttcgaggcagggtttctctgtgtagtcctggctgtcctggaactcactctgtagaccaggctggcctcgaactcagaaatccgcctgcctctgcctcccaagtgctgggactaaaggcgtgagccaccacacccggctttgtgtcatggttttaagcaatatacctgaacagtcagcctacatctctccaggttctacctccaaattcaaccaccaaggatcggaagtgttcagaaccaagtgcagacgtgctggtcgagtctagattagttttcttatcatgatatcccagactagagggcgtaataactatccacagatcattatgtcaaactgagttgtctaagaaacctgggaaccagcttgagtatcttggactctgcatgtgggcctgtggtctggaaaagctgtgtctcaagttggaatgagcttctggtctccacaggccctggaatccctcacccacgtgaggaaccactgttaacaggcatccagagagggacattattgtctccattatagatctaaagagccaggcacagtgtctcagacctgtaatcccaccactcaggaggctgaggcgggaggatcaagtgtcctaagtcaacctgggacacatagcaagaccctatttcaggaagtaaagaaagaataagagatttgccaagggcacactgctgggggattactgcatgcgtgaggatttgggaggtgatggatttgaagttgttttgtttgtttgtttgtttgtttgtttgtttttacattctttgcgtgtgtgcgtgcacacctgcatgtgtagaggacagaggacaactttcagaagtgtcttctctcctcctacgacatggtccccagggactgaactcaggtgtcagacttggcaacaagtgctttaaccccactgcaatatcttacctgtcctgtttggagattttagagttttgccgggcaatgtcgctttctttgggaaaaggtctacagtttgcacaacacctccacagaccctacgatctgtaagctgtccctgggtccctgtgtcatgggtgtccattattttttgtcccacccacttctcttcactgacatcatttaggattgccttcagctaaggtccctcggctaccagtggcatctcaggagcgctgacatccctgtgcgtttcttgtgcctgccgtgtctccctagagtcctctctctgtcaccaagctctctctggtggcatctactttatagaacatgtgactgctctgacactgggtgcctgaggcaacacggctctccactcgggaactgaatggcttgtgtagcaatgtgtcaaccgcagactgtgcaggaagggacacacttgacccttgatcctgatgtcccgtccacacagtctgccctctacacaatccatttatgccctgtgctgacaggctgcacctcgtagcagagggcatttgtaaataaactatgggagctagatgcttgggcatcttttcagagccaggaatcgtaggccacagtcaggacaggatgtgtacatctcttctccaccgtaagtgtaaggcctggacgtggctcacaggaccagcttgctacataccctttcaggggttatcagtccagccctgctccctggggacaggcatcagcttgcacactgtctctggcctttcctgacctgccatagtcttcatccgctgccaaactcttctccccagcaccggcccccaggcccctccttcatgggcatctcagccaccgccgctcccagagtacaggttttccagctccagctatgatccgggctgcgcttctcgccttggccctcgctccagcttgctctccctcttggctgcaactcccagcccccggcccacgctaatctgtttctcccacctctcctggtgccgggataaccattttaaaaactgccctcgggaaatctaatcaaatgagagcaaaatctaatttggcactaaaagcctctgactgaagccctgatttctggagctttgtggagcctggataataatgcctttctgggtttcgcaaaggtccaggactggggagaagagagggcgagagaactctgatatccctggtatggaggatgaatgggctgggaagagcaccgcttcctgagccagctggcctggccacgcaccgagagttctcagcatttggagcacaccagcaccacaaagcccttggcctcaatctttggggatccccagctggggacccagaagagatgggaggaaacccagtgccaccatgaaggttcggccagcgttctccggttctctctcttatctgcacagtgagagctgacttgtacttcctgaacaagctgtggccctaggttccatttagggcatgccgggggctgtgaacatgttccttcaagcctgtccccagcggtccacttggctaaccaggctgcatgtctccgtgcttacacaacttattaaaacagtgccacctgctggaggtcaagttcaaatatctgcacctgtagaacacattttagactcaaaccctaccaccacctcagggagtgcagtctgtaggtgacaaacccacacggggaatatatgacaaaggctgttgagcggagcagaagccacacatgccctggggctgttagcatacatcagcaattccatatgctgtcactatggtttttattgacagcgggctctgttttcttatttgtgcttcagtggcttcaagtgggaggcttttccatccctgtgcatatatttttttactttgtttgtttgtttgtttttgaaattttgaaacagggtttctctgtcctggttgtcctggaactcacgctgttagaccaggctggcctagaactcagaaatccgcctgcccttgcctcccaagtgctgggattaaaggcatgtgccaccactgcccagcttaattttctttctaattgtaatatattttaaatttttatttatatatataaatatttatttatatatatatatatgtaaatgtgaggatatgctgagtgtaattgcccaccatggccataagagggtgccagatctcctggagaggcattgtgtgcaattgtgagccacccagcttgggtgctgggaaccaaacctgagtcctctggaagagcatcatgctctcactagctagcatctctccacaccccctctagttatcctagggggaggagtgatggtgttctatttactttcttccttgttgaagtctgagccagcacagaaagaatggtgacaaggttgggagccagcctggatctgggaaagccacagcggaagggcctggcttcttcctgatggcatttgggcttcctggacgtacacacacacagagagagagagagagagagagagacagagagagagagagagagagagagagagggagggagggagggagggagagagagagagagagagagagagagagagagagagagagagctctgttctcaaaggtcccacgtggaagggcccagcactgtcctctgggcccagagcagcccagccccctcctgccttcccctgcaagcaattccttccctatctctctctcttattttgagagttgcaccagcacccactggttactccacagtcacggggcacagctccgatcagtatgctctcaagttatcctaccctcctaccacagtcaaggtcctgggctggccttgctcatagtggagtgacttgggacctcggtgtccctgtctggaaatagaggactggggtataacctatgcgcagaatagtttgtcccttaccccggggagaagctctgggtctcccctcctgattaatatggattgctgtggttttattaatggcggcatcattgttgaccaatacagacacagaaatccaccgtggccagatggccccaccaccaaggccacgggggtggggggtgggggtgggggggtaggctctatgtttctgtaagaaataaagcaggggtgtagtgctaaaacccccagccccttccaacctcatcccctccctgcacccacacccaccagcttcatagatttcttctgcccagcttttgaatttatttaaattagatcatttaaaaatatcactggaaagagtcttacagaatgtctctctatctggtctatgtcttatactgttagcatgcacccacactcataaatgtagcacaaccttgtgccatattttattatataactatattccatttcatccacacatctttcagctaatgaacttgtttctatttgctttctgagtgtaccactgtcagctggccctgggtgacttttgatgaacaactgcatgctgtttcaaactgctggaccagagcccatgttcaagtttgatagaggatgccaaagagattccaaagtgttgggccagttgacacacccccagctattttcaagaacctcagttgctccccgttccatcaactcttggggtgctgtcaatttatctgggactggggaatacaaactctagagcacccctaagcctgaacaaggggtgtcttagtcactgttctattgctgtgaagagacaccgtgaccaaggtaactcttataaacgaaagcatttaactggggttggcttacagtgtcagaggctaatccatgatcaccatggcggggagcacaacagcaggcagacagacatggtgttggagaaggagctgagagttacatcttgatccttaggcagcgggcataggggatgagacggcctggcatggacttttgaaacctcgaagctcacttctagcagcagacctcctctgtctgacaagggcacaccttctaatctttccaaacagttcaccgactggggactaagcatgaaaacatagtagtttatagcggccattcttactcaaagcaccgctttaaaaagggaccagctctcttctcactgacctacggcagcagaaaccaacctgtctgcttccaccatgctcacggccacaaaccagagtccagggctttatcatccataggaatcactgacttgtttgtttgtttgtttgtttgttaagacaagctgtagccctggctgtcctagaactcactctgtaaaccaggctgaccttgaactcagacattcccctgcctctgtttcccaagtgctggtattaatggcatatgtcaccaccacctagcttgatctcttattttttaaaggacatattatctattgtaaattattttagtatttctatagccgtatttcaagtcccttgtttcttccctgtgaccctactatagactttgaactcgtacacatgtacttctgtgaggaggggccctgggctcccccttcctgccaaagggcagaggggtgtgttggtctctggctgtgaacactcaagtcagtcagcatcactgagggttgccaaggccagggctggctgctctcttgctcacctctgatcgccgatctcttccagctttcttcggaaaatacctcaatgagtacaacggctcatacgtgccgcccggctggaaggagtgggtcggcctacttaagaactcccgcttttataactacacactctgccggaatggggtgaaggagaaacatggctcagactactccacggtaagctgtgcacccccaggccccaccaccgcctcccgagccaggggaaccctactcgtagctcaccctgtggccttggagaggatgctcgtgcctaattagatgtgtggccttgagcatcgtccagtgctgcttctcaggttccccatcgctccactgctagagttaactcagatgccacctcccgaaagaggccccctcactgttccagctaaatgacgtccccaagcccagtttctggagtctgaactccaacattcaacagtgacccagaacaccttgatttctctgtaccttcgtctctaaggagggattgttaccatgtccattctcagaggaccataaacactcaattgtggtatcgttattcttttgctgcccctcccgccatgttcccgactctctcctgctctcttttccttcgccaaacctcgagtgttgtttcttttgtttctgtgataccctgacaaaagcaatgcctacatgccggggctgttccgttcccctgtctgtctgttcaggccaggattccagccaagggaatggcgccacccacagtgggcaagttttcccacctcatttaaagcaatgaggataatcccctccacagaggtggccaagtcagtctcccaggtgatcctgggtcttgtaaaggtgacagtggacactgactgtcatggcagctgtgtgttgtgcttgcctctctgctctctcctgccatcacctccttaaggacagtgaccaaaccatggtcatacccctgtccctgatgcccagcacagtgggtggcacctagggagcactcggtataaatctcccggtcctcaccatcctcccatttctcccgccccaggattacctcacggatctcatcaccaatgacagtgtgagcttcttccgaacatccaagaagatgtacccacacaggcccgtgctcatggtcatcagccacgcggctccccatggccccgaggactcagcaccccagtactcacggctcttccccaatgcgtcccagcacatgtaagcctcagcctccactgggggtgggagggtccgtcagggcttagggacaatgggacatcagcaatgtagttgaaccttccttaaaacattcctggttaaagggcccaaaagctaccatgccagcacttgagaggtcccccaggagggtcaagagtacaaggccagcctcagctatgtagacagttgaggctagcctgggctatatgagatgctgtttcaaaaaacaaatagacatcaagagcagggaaaggggaagctatgtggggagatggttccgttgctaaggcacacaaagatcctgggagaccggctgcttatcaggtgcagctctgcggcacagaccagccagcctgtccctagcccctggcagatgccttctggctgggattcatctcctcccactcagaagctcagcatatcccctgtgagcctgtgtttatgtccgacggagcctgtacaaagtgtctgagagggggaacttaggagagattgacttttgttcccagttcaaggatccagcccatgatggctgggagggcatggtggccagagcaggaggcagctggtcacattgcatctgcagtcaggacacagagatgaatgctgacacttttatccatctgtccgggaccctagtctatggggtggtatttcccacatccgggcaggttcctacctcttgaaccaccctcacagtccttaggtgacggcaagtccagcctgggtgccaacaaacaccatcacagggtccacggctacaccagctactggccgtggaaaacctcagatcttcatggtgaccctggtgtaccagttctctgttgccacatagcaagtgactccaaagtttaacaccattgaacaaacagcaaacacacatcagctcatgaccctgtgctaggagcctgggtcagtgagctgacgtcctgaccccgatcttacttctagctgtatgggcctctccatcttcaatccagaaagagaaagaggcaaagatggaagcaaccatcccatctccctgcacagggcacacacctcactgtgccatcagagaagcctgcataggagtgtgaagatcaaaagagggtcattaaggccacctttgatgctgtctcacttagtgtccccattttacagacgaggaaacacagaggtcacccagcttcgataccacagaacctggattcaaacccagcccccacccaggcttcccacctcaccgccaccccgttagctagtacagctttctagaagatattctggcttttctcggcctcagactatacctcaggctcagcagtgacactcagcagcccttgctgtgacattctggggtagcaaggacagggtaatttggactcctccttaatatccagggtgtttaattttcattacggtcagaatgcgccaccctcccctcccccggctcagctctaatgacttcctgacagtgtgccacccttggagggattacagggtatgttagccttctgacccctggacttctgggaggagcagacaggagataatgaaccacatttggggagcagtgggctaccctcaccctgagagccccatagagtgtctgtctgcctggctgccctcacccattgccctctaccctccttcccagagagagaggccaacagtgctccatcctgggccaagttcctaccagaggggtgtgacatgtgacactgcctgctcctgtactgtccctttgaaatgaaattacagactctgacaatgaatagcaaggggcttgcttgtccagagactctccaggccactatggtggctctgggaggctcctgcccctggaagacagtggctcctaacagttctgcaggatggtagctggtccaggagaggaaaatggtggcgtgcagggccttctggtaggcatctctccctcaccaagccagcctgatccatgcccctggagcagacttttcgtgctgtaacaaacattactgagctcatgacagccctgctcacttccctctgtcctcccagtatgccacacccatgcagacacgctttcagatgctgaaatatagacgcgtaggaacgtggggcacatagcacatatacacaaacatacatgttcagacacatgcatgggcacgtatagatccatgtacatggcacatatatagagacacaccatacacatgcagataaatacaacagtcacaaaagaactcacacagagacaaacacaggtaaacgcagtcagacacacaccaccaaaacaaccacatgcacacacaaacacacaagcacaaagatacacagagccatacatgactaggtgaacatacagctacaaaagctcacagacccgcacagacatgtgcacatacacctggcagccctcagcacttcttccagcatgtgatatctgggagcaagacctcccaagacctgtgaagacaggggctgtgatgacatcacagcctgctactctgaggctcatggtataaggggtcccactggacgatatgaaggaggtcacctctgtgcatcacctcgggtaaggaaaaggggtggccaactgaaggatctttggggacacccagacactcttcaggtatttgaggagcccagcctgggccaggtgactagctggctggcccaggtcctgagttaggacgcagctctctagcttctgattccatagtctcccagagtgaaaggctgacaggagtcactcactggctcccatggtcaccctccacacaagagcctgccagacaggcctcctagtgaagtcaaggatagctattgtatcctggtgtctaagctgggtcacagggagtgacttcctcatagtccagaagacagtgtggctccaccactacacaggcagccccggcagccccttctagctccctgagacaaggaggcatgcttccaagaatgttctacacacaggtcatgccctaggccagccgcaagggacacgggcatttctcataatcaaagaccatgtgtgcagggagggatttagcagcaggaagcggcccagagctggggagccttgaggccctggcttccccacaagcacacagtagcagtttcctaactgttggactgctgcaagctaccatggtgccatctctgtacaagaccttttgacatgtgacagagtaccgaggtccctaggtagggccagtgcccaagctggtaccagggagagcactggctgttctgacaagaaaacccgcccctcctctgcctcacacagcctcccatccccctcctgactccactctgattagcctgtctgtctcgagcaagaaacaactcaactgttggctgtaatttcagcttactggggtagggggtggaacctgaggggactgggtgctcacattttgagacccagtggatggcagagtgatgccctcttccggtgggttaggttcagatttacagtttgtgtttttttgttttgttttggtttttgttttgttttgttttgttttgttttttgtttttgttttccccagagaaggtgtccctctctgttcaagcaagccttgaactcctgatcttccccacttagttcaaagagcgacccaatcacaactggaagaataattgtgacaaagaatcaaaaaacatgtcttgtgtcccaaaggtggacattcttggaatgcgtgggccctgcaggcacaactgtgacatacttaatttttacacctatttcttgctgtctcaaaccaagacttaatgcaaagagctcacctacctgtaatcctccctttaccagagtgacagccacctgtgtgctccagggctgagaagtcaatagatgcaatgcaggggtgggaagtggacctccagttctgggcctgagaaggctctcaactggagcctctttgaaagggttgataaatgaataccagaaagttttcaaaggaagactcatgccaagctgctggctttctgcacttgggggaattcatgtccatttaaggctctgccacctcctgaaggtggctccctcccatttacaccttagaccagtccacttgcccccaactggagtgagctgttcacggcacttgtcttgactgcctttgtttgccaccagcacaccgagttacaactatgcacccaacccagacaagcattggatcatgcgctacacgggacccatgaagcccattcacatggaattcaccaacatgctacaacgaaaacgcctacagaccctcatgtctgtggatgactccatggagacggtaggctccgcccctgccccgccccctggcaagcctctgacctaatctgaaaatctaagtcaaagagccaaacactatgccaacttgggaaaggggcttggagcaatccagagggaaggcttttgactcctgaaattttcccatgagtctttgctgcttgatgaaaccacagtctttgctgcttgatgaaaccacagctgcttttctttcttaaaaaaaaaaagaaagagggggctgatgagatggcttatcggttaagagcactgactgctcttctggaggtcctgagttcaaatcccagcaaccacatggtggctcacaaccacccgtaatgagatctgaagacagctacagtacacttacatataataaataaataatatctttaaaagaaagaaagaaagaaagaaagaaagaaagaaagaaagaaagaaagaaagaaagaaagaaagaaagtcaggcgtggtggcgcatgcctttagtcccagcacttgggaggcagaggcaggcagatttctgagttcgaggccagcctggtctacagagtgagttccaggacagccagggctacatagagaaaccctgtctctaaaaccaaaaagaaagagagagagagagagagagagagagagagagagagaggggaaggaaggaaggaaggaaggaaggaaggaaggaaggaaggaaggaaggaaggaaggaaggaaggaagggactagagtctcattctgtataacccaggaaggtgtagaactcattaagtaactaaactggcctctaacccatgaggagtctcctgtctcggcctcctgagttctagaattacatacaaaagctaccatgcttggctgcttttatttcttaaaaaaaaacaaaaacaaaaacaaaaaaacaaacaaacaacaatatcaaaaacccacttaaaagttcagtagctttattgagctataactcatacactcagttaaagtatacaacacaatggggttttttgttttgtttttaagacagtctcctgtagcccaaactggcctagcactcacctcctgccttcacctcccacattctaagattccggatgtgtgcctcgtgcacggccctcactgacttgcattcactcagagttctgcaaccattaccactgtcaagttagaacattttcatccctccagggggattaaacaccttcccttagctgtcaccccgtctctgcaggtactaaggtcttcctgtcgtcactctggacatttcatgcaaatggatcataaaaatgtggcctttggggactgccttttttcatgaaagcacagttttcaagacatggcgaagtctgtatcacaatgtccaggacccgcaggctggggaagtctgactcccaaaagttgtcctccgactttcacacacgtgatagaatatactacacacacacacacacacagagaatcatattccactgtgtgggctaacagcttactcaaaggggatccatagctatctaaatttaaatcaaaatactataaaattcaaactccattccttggccacacacaacatagttcatatgctccatagccacgctggacagttgcagaccctcatgcaggattctgtttcaggttaccaactcccaccctggccctggccacatctagcgttgtttccttccttccttccttccttccttccttccttccttccttccttccttccttccttcatgcattcatgcattcatgcattcattcattcattcatgcatgcattcatccaaggtcatttattaagggtcagtgcaagtgcaacacagctgccagagagcaaaatacagagacccccacacagcaagaccccaccccataggaactgtccacagacaagggacagatgttaacaagtgtaagagacaggataagggagtcagttccgggggccttgcagagaagtggacttgccccaggcatggtcgagatgggaggtgtgctgagagcggagggctcccacgaggccagccacctcacctctggcctctgttgcagatctatgacatgctggtggagacgggggagctggacaacacgtacatcctgtacaccgccgaccacggctaccacattggccagtttgggctggtgaagggcaagtctatgccgtatgaattcgacatcagagtcccgttctacgtgaggggccccaacgtggaagctggctctctgtaagtgtgtctcctgtgcccgtaccccaggtcccaggctcacggggagaccttggactctgcttggtctgaaactcagcacaggtccaatccacgcctctcaggggcaagattctagaacagttgtaccagccattgtgtcggccagggtggactccgaggagggtcatacccttctgaggcggaagccaggagctatgactcccatgaaaaacagcgaggcggggttccgtgccaggaaatgccagagcctgggtgttgccagctcatgggaaggttctttgattcccaccccgtctgggcagtcactggtctggtggctgttgaggaagagatctcagacttaagcagagagccattgtccactgggcctgctcctggtggcaacaccgagtaagctgtctgccgtctgctctttcctcaaggaccgtgtgggccatggccttagccgttctccttggcctaacctttgaagtggcaaccggaaacagaaccgcttagaggaggcagagttgaatgaaaggctggcaatcgcggccgcctcatctctgtagcagctggggggctgggggagggggggtcaaagtccagtcaggtatatccagagggaggactgggacttgcacagcccatcttccacgccagcaagggagagaggcaggaggataccgccagtgagaccgctgaacatctgtccacagaacagctggagcgccaacccatccctcatagtctttgccgggcccctctcacatgggtggctactgagtggatcaccctaatgtgatcccaggagtggggtccccaagcctatggggcttgtcaccagactccttgttaagagctaaaagcgacacacggctgcctcgaggaaaatcattctgggtcgagtataacaggtgctcagaggccagactgtgcgtgcccagccagcaagaaccaacaagagggcgggcatgaaccctagaggcagaggaggatagtattagggcatgtaaccttgacagtgcagcaccggacggtccggctggaactggcctccctacgggtcagagtgtcaggatggaagctctctcatttgcagatgtccctccctcttcacctccagatgcctctgtcccaagctaagctgccacccaggtggccaagtttccactccctctctgttccccaggaacccccacattgtcctcaacattgacctggcccccaccatactggatatcgctggactggacatccctgcagacatggacgggaagtctattctcaaactactggactcagagcggccagtgaaccggtgagaaggagcaagagagacccagggaaggaggctccctagccagggggaactcaaccacggggaactgggaaggccactggaatcaggatctaggtgccccccactaacccatgagagattgaaggaccagccctctctgggattctatcctcccatttggagctaaggaccttccaaagctaaaaggatgaaaagcccaaagttaacagtagcactgtgctgtgccccgggcactccagcacgttggccctcatagtaacccagtaaaggaaagttgtgttctctgaatcctagagagatagaggataaccaagaagtcagactcttcgtcacaatggctatgacttttgtggccctattgatgggtggtgggactgaccgggagtgtgttccaggtgtcctgggtggctgaaggaagcagcaatgaaatggggaaaacaaaacaaggaaggtggaaaggaaggtggctagagatgaggaaccagaaaggcaggagcgaccccttgtggtcaacagtgaaactgccccctggataacagatctttctgtgagcctctcctagactttcctcccagggggcccagccctgagatctacaggtggctggtggccctgtaaggtcggtacatcttccaacgaagggggctggaagggtctaaaatggacacatgcagagtgtaggggcacaggacacttgagaatcggggaccacaaggggtcgctcctgcctttctggttcctcatctctagccaccttcctttccaccttcctttctgtttttttttttttgtttttttttttcccccatttcattgctgcttccttcagccacccaggacacctggaacacactcccggtcagtcccaccacccatcaatagggccacaaaagtcatagccattgtgacgaagagtctgacttcttggttatctcatagatcaggagaaatgaccccctgcaggcactcattagcccagaactgggctcctgagagactccaaaactcacacacaaacacacacacacacgtgcaaatgcccatgtaactgtacccatttcaaccacaaagaggcattcagaacacatcttggagaagcagccctgtccctggggtgtggaaacctttccagtgtcactcaatgactgccacttggcccagggtatggagaacctgtggacagggctggggacacgggaacccggcagacaggatgctggacctgcttgttttctaggttccacttgaaaaagaagctgagggtctggcgagactccttcctggtggagagagggtgagtgccggccgggcaggaagacccccatgaggagtggtcacaagactgtgggaggctgaatagtgctgtgctagtgactgggtgactcagagctgtgtccaaattccctgtcacaattgggtggctcatgcagaattcgaatctggaggccacatgtccccattcaacatacttggcagagcctgtacgatgtcatcactgttcatttaatcctaactcaggccatctgggatagacagctcctgtagacttcccattaaaacccaggtgctctcaagccaccagccacccatcctccacagtaggtctccacagagctatgcagggccggcagcctaggcaagcacaagttgccccagggctccacccagttcaaccagccccgcatctccctcagcaaactgctccacaagagggagggtgacaaagtgaatgcccaggaggagaacttcctgcccaagtaccagcgcgtgaaggacctgtgtcagcgagctgagtaccagacagcatgcgaacagctggggcaggtgaggagatggcggatcttctgggtcctctggggtgtggttgccatggttacatgggaggctctggtccctgtcagggtagcagtgtcctctgggtgtgtgaccttgcactcctcatgtgggaaaacaccagcaggcaggctcaggtggcaaacagcattcattgcctcccagctgacttgtgtggtataactctctgcggctggcttccgtttatagggggattaggaaatagctttcaagattttttttttaaaaggacattgattgcaaaagagacgctaagtaaacatataaccctggtagtatccagggagagaaagagccggcgtctggaggaggcctttccaaggtgagctatagagattggggagggatagttagccgggcatgagcctcagagggcagggagacaggaggagaggagtgagagatgagggagagatgtgggcatgtggaacgaacagaagttgggggggggggatggcccaaaccaaggggagcgaggacagcaaggagctgtgacatcgcagactctggccaccgggtgagtggactggtaaggagagggcagggtgaaccagaccttgagaagtagtcaaggacactgggctactatcccagctccagcacacctccagttccccccagcccgggctatgtctggggcgaggctctcttcctcttagtgctttctctcagagtggagatcgtgacatagctctttcatgccaaagtttgagttgcactgaaagccgcatccatgagcactggaagagaatgggggagggaggctgaggaagagcagggattagaccaggtattagcagctcagatccaagggaggctgaccaaccaccatgaggacataactttaggcagacaggggctgtattggtgaacgccatggtaggtccagctaagtgtggacaggagggagaaacaggcagtcggagttggcacgggtgtggcatttgccaagctgagcgtgggcaggaggagaggtaggtgtggcaaacaggatggtggggatggggggggtgacacctgaagccctgctgtgtcccacagaagtggcagtgtgtggaggacgcttctgggacgctgaagctgcacaaatgtaaaggccccatgcggtttggtggcggcggtggcagcagagccctctccaacctggtgcccaagtatgacggccagagcagcgaggcctgcagctgtgacagtggcggtggaggggactacaaactgggcctggctggacgccgtaagctctttaagaaaagtaagtgtcaccagcctgcccaaagttgagaggatgagcagccatggctctggctgggccatgtgaactttcaaacaactccacaggtgctcgctccaggcctgcaggtgatcctaggagctagggacacagccaaagccctcacacaagctccaattcaagagggcagcagtgctgggacaggccactagggggcagtatggacatggaccaaaggcaggcaatggagccaactgggccctgtaggcttggtgtcgccttctgggggggggtggggggagtaggatggggctctaatctggagcaggcggaaatgataaggtcaacgggttctcaaacctccctcaaatgaccactctaatggtgagagcagcagacagacagctgagggactgacaagaagccaagtggcatgtttgggccttaatgtccaaagaggtctagttatgacttgaaggaaaagccatcagagcatactgaccacgtgcttccacagtccacactggcagatccccctgctcccaaaacgcatctgtggcccacacgtgtggaggtcgggtcatcttgcaggagttagctctctccttctaccacacgggccacggggatcaaactcaggtgtggaagcatctttacctgcaaaaccacctcactggctctcctgacgttcaagttgtttagcctgcccagtgtaacgacctcccgatgacccacttccggggatagctctcccaagcccgcacagcatgcaacactgagactggaacttggggttttacccctgtcttgattgaaggcccatggctggggctccctggacagcctgtcccagcctctctgacttatcatccctcctggcacccacagagtataagaccagctatgcccggaaccgctccatccgttccgtggccatcgaggtggacggtgagatataccacgtaggcttggatactgtgcctcagccccgcaaccttagcaagccgcactggccaggggcccctgaagaccaagatgacaaggatggtggcagtttcagtggtactggtggccttccagattattctgcccccaatcccatcaaagtgacccatcggtgagagtctggctggaggttgggggtagagggacaggctgggcctctcttctcccctcggggccggccactcatgaccctttctctggagcaggtgctacatccttgagaatgacacagtccagtgcgacttggacctgtacaagtccctgcaggcttggaaagaccacaagctgcacatcgaccatgaggtgtggccactggggcagcacaggctggcggccagcatccacaggaagggcggggggcctggtgaggggagaaagcaagattggtcccccagaatccatgaccccatcccagaataggaatctgagtcatggggtctggaagccagccaaaggtccagctcagagatggctggctggctggggacagcgcagcatactttatttagacctgtgagacacccccctatagagcttgctctcgctacagcctccgtaggctctgctggcggtaggaagagtctgttccttcagggaggcccccttccacgggcagagccacaaacgtagatgtggctgtacccttcccacccgcagtcaccctgtggttcctaggcttctcccattccctccctcagatcgaaaccctgcagaacaaaattaagaaccttcgagaagtcaggggtcacctgaagaagaagcgaccggaagaatgtgactgccatagaatcaggtgagagagcagccccggccccactcaagccctggacaccagtgcgtcctgcggatacacggggccctctcagcactggaccctgtctgtcaagataaggagccaataactctcatcagggaaactcagggaccgcccccgggggcggggtcaggctgagctgtgtttgggcaggccccagccttggggcacaggcttctgctcactgcctttgggaactgctgggctgccactcagggttctgcctgcctgagagaacttcccacacagaaagacatggagtctctctgcagtcactgtccagggtggcagtcacataacacctgtgactggggaacctggagcaagaattttccttggtttaaattgaaggagccacacagttctgaacacctttgctgactcgggccagtctcaaagcccccttctaagcatgaggtacatggtatgatacaaatcggccttcagaggccacggctgacaccaactgaagccaggcccagcctccagtccgggttaattatttccgtcctgaccttgtaaagtctgacatggggcatctaaaccaagcatggagctggcaaccagggggatacagtgccctccatcccacctaggaaagggtgcagtgagcaagagcagtgaaccccgctgcatgcctgccagagtatcctgcaaagctctgactcttggggactggggtgggggggtctgttgcagttaccacagccaacacaaaggccgtctcaagcacaaaggctccagcctgcaccctttcaggtaagggtagggataggccaaaggggtaaggtgccatgcctacctgtctgtagctaaaacacacaaggcacattcaggctgggctgggttttccctgggaggtgaggtctacgcagtccttggaggggccccaggttcatacaaagactggttagatatggtactgtagccacactaagcactggacacccatttctgccgctggtgggtggggctgaaggaggccagaggaggagaaaggccctggggtctggccctagctgtggcctggacaacagagggacttagagcccttgatgacgctgcccaaccactggggcgaaccacaaggctgaggtcattgaaccctcagaggtcctaagcgtgtgtggtcccctgtgccctcaggaagggtctgcaggagaaggacaaggtgtggctgctgcgggagcagaaacgcaagaagaaactgcgcaagctgctcaaacggctgcagaacaacgatacgtgcagcatgcccggcctcacgtgctttacccacgacaaccaccactggcagacggcgccactctggacgcgtgagcaaatgggcaggcagggcatgggaggcctgtgtgtgggcaagcagaggcaggcaggggacaggggagttgtgtgcatgagcaagcagggacaggcagagaatgggaggcctgtgcatggccacctacctttccctggcttcagagggccaaactgctagaggtgtcttagaaacctgtgcttgtcacttggcatttgagagcctgtctcggggaggctgtctgaccgactgtctctctgcgggcacactcaggacattcactcttccttccacagtggggccgttctgcgcctgcaccagcgccaacaacaacacgtactggtgcttgaggaccataaatgagacccacaacttcctcttctgcgaatttgcaaccggcttcatagaatactttgacctcagtacagacccctaccaggtacaggcatggtcagggagacagggagacaggcgtgtgagacacaggcatacagctgcagaagagaagcccctcacggcccctaagcctggaagactgagttctgaggccacttggagtctgggactctgtgttgtccacatgcgtctccctccattgccctgtgtccgatctacagtccagttcttccctccccctcaggcagactgcctacagagctcagcaggtacttctgtggacccttgatcagtagagctacaggatcaggccacgttctggactctctaggctgccatggagagtacagacaagcaaccctaacatttacccagcatgcacccaagacaagctctgtgcggagtctccctcctttggacacacctcagcacaggtgtgactgcagtggctcagagccgcacaagacaaccacaagcagcaaagctcctaaaaccagaaccctgctccttagccattctggaaggtgaccttggtaatgaccaaccactcaacctcattcaaaaagcccgacacagctccatacactgtgacttcaatatgtcagcagccatggcgcaagtagccagagaccgccagttttccttctctgacactttagcccatactttaccaaagagggtggcagacatcgtcagttagtaaccatcagtagtgccagactaggcaaagccccaaggtccctggcccacctccataccaagttcctccatcaagaggaacaaaaaggtcaaacctaaggtagacctgcggaacccggctatgcaagatacccaatggggggctggcgagatggctcagcgggtaagagcactgactgctcttcccaaggtcctgaattcaagtcccagcaactacatggtagctcacaaccaccgtaatgagatctgacgccctcttctggcgagtctgaagacagctacagtgtacttatatagaataataaatagatctttgggccggacctagcggggggccgaccaaagcaagcagaggtcctaaaaaattcaattcctaacaaccacaagaagactcacaaccatctgtacagcaacataaaaataaataataaataaatctttaagagagagagagacccagtgggcagctgcagaagttcaaggtgaaacccacaggcatggtttgtgtctcctctggaatttccatttccactgagcagacctggcagagtacctgagccttcatttatctcccagcactgtggctcttgcagaaataaaggttgggtattgatagtcaccccacccccaccccatagctcctgtactcccagcccacctgagttaggtgctctggtttgaggagatggaggtagggctcccagaacactccctgttgacagctcccctttcccatcagctgatgaacgcggtgaacacactggacagggacgtccttaaccaactgcacgtgcagctcatggagctaaggagctgtaaaggctacaagcagtgcaacccccggacccgcaacatggacctgggtgagttggcacgagtgcagcctgcagagaagagagtgtatgtcacgtctgccccaacgatgagcccagaatcacagggaagggtacagagaagctgtgcttccaggagttgagaagccacacaatctatacaggacactgacttctcttctctgtttcgctcccttttgttcattcattcttcatgaagaacttagcctcctgagttccttgggcagcaaatgtatgggcaaggtgtggagctcctcctggccaggacccatactgggaggcatctggcttgaacggagtgagacggggacccgcaatgcaatatgctgtgatcgttagctctgcgatagaacaggggcgaccactgtagaggaaacaactgtcaattgcagaggaaacatggagcgctgggaagtgggaggggcatgaagccatccagggtggctgcaacagaaagtgactgacctggcggccaggctctgtgggccagaaaggaaagtctagactccattgctttggagaaggatgctggaagggtttgcatttgggcagtgaaagtcaacattttaaaaagacagtgattattaagtagaagatgaagctggatccagtaaatagtgccacacactatggttatccagggagagcgtgctcagtaggagagatgatgccagacaggcacagtggggaagcccacatcacatggtgattcaagatggataacagaaaaggaggtggcatgggctgccccctgggtttgcggtgagcggggtaaaactggcacttctaagctcaggatgccagctagatgggggttttgttgttttttttttttttcaagatgggatctctttgtgtagccttgactgtcctgtaactcactctgtagaccaggttagcctcacgctcctagagatctacctgcctctgctttccaaatgctgggattaaaggtgtgtaccaacacacctggccagctagatgtcttaatggaggacatcatgctattagcctcagccagtatagagggaaccacaaaagccatggacatggaaggcctagggagacctgtctgtcctaagctgcctcctgttcctatcaggaaagtgggaagttgaggagacaggcccaggtgtgccagtctgccttgcaatggggggtgggggtgtcaaataaatgggccgagagtgactgcagaggagaaaagacaccacctgactctcaagtgctcctttgtgacagctgtggaatctcctataagtactgtgccaagcacaccgcgccaaatgatagtgtgtgggaattctcacgacagccctgaggtgactctatccccagcttaacagtgagtgaagtgaatccaccgggtgactccatacccgtgctcttggtcataccacccacagccagtgagccttgtgtggcactagtacccacaccagtgcctgcttccccttctccatcactaaggcgattgcgaatgaaggctcaatgtatacgatggctaactgggctcagcagggggcaacctgcaagtgcacctagcagactaaagggcttcattattccctctgagcaaggaaccccagcaacatccccgcactggcgttcagtaaactgaaggtggtcctcggctgtgtcttcgttagcgatcgcagatcgtgctgatgcttgcaccatttcgccctaaagcgttcttattctgttcttctctcacccagggcttagagacggaggaagctatgaacaatacaggtatttggggttgttcctaaagtctgggctaagatcccttatcttgacctgtcctgtttaaaggttgtagctattgagaaactgtctgtctagggcataatgaccatcagtgatagatgtcgtctcagacaccatctttacacagcccctttggagggaggaacaaagtgatttcctcaatggtgtttaacacgcattttccttttggcatctgaaaatgtaggcagtttcagcgtcgaaaatggccagaaatgaagagaccttcttccaaatcactgtgagttgaagaaccagtttgcagacgagcagagctggttctgacttgctagttttgttgctgctattgtctggttgttcttagtactggcattgaagccaggaattgatcatgctaagagctctacaccaaactccaccccagccttaagtgtctcctttccagggctgggtctatctttattaccctctcctcccctgctaagatggtataaagtcatagctgcttttcctataagataatgtgaatacatttcatatttcaaattaacgccaatcataagttgctgttctctctgtaagtctgggggcttgagctattatgtagcgctgagaagtactacaggtgacagacaccttgaaggatgtggctgcagaagcgctgacagggtgtgtccctctcagcagaatggctgtcaagggccatgtgcagactgcagcaacctgcacttgacctcatgtctaagggggttagggggtggggtggggagaagagccaatcgttccccaaggggtccaaattctttgccagattctctcaaaagagcagttcttttccttacggcctaagtactcctttgcatcagccacatccttgaggcaacgcttgcagtgtggggctgacttaaatccagataacactgtaatcacaggctgatgtgcactttgttctgcaggggacagctatgggaaggttgggaaggctaagcggccatagagagaggaacctccaaaaccaggggcctcgtgtggctgcccaggccatgcaaaaaacacccgattcccagaagatgaatgttggaactgggagacctgacagaaggcagggctgctcttgggacaggaaatcctggaggacagcgcctggactttccgatgctcagtttctttgccctgctttgctctggatcaaacctcactggctgctctgggatgcgtgctcacacctggagtctctgctcaccctttcagaggctcacaaagacaaaggaactaatttccatggacacttcctccagagatggaaattgctgggattcgcccactcctcccctgcacccctcccccagtcatctagggaagcaagcttgttttaaccttcttactctttggagaaagcacggacatcccaggtgctgtcaacctcacagtcttgacaaagtctatagcacaaaacagtaccattcaccaggctggttgacctggctggctcagaagctgccttcaccacatacatgaccgctcacacgtaaccaacacagggaattgtaggggaatctcactaatatgaaatcccgcttttcaagagtcgcggtgtcaataaacgctgtggctaggatcaaggataatcccttgagctttcagacatttattcctgcccgggattcgttcctttgttatccatcccagaactgatgtttttctaaggtaccgaaaccccaagttgatgtgtgtcctgtgttttaatgacattgtatttgtaaagttttgtagtataagtaccatcttacagtgttcctgcccccagccaatgtctagctattggtatgaaaaaaaaaatctttgaatttttgtaaaaggctatcttgggacttttttgctctttattattatcatttttttcttgaagcactcaagatgttgtcgaccttcagctgagggttggagaagcagagggtaatacattaatagtaaacctctccgattcaagggacctcataggtaagtctcaccagctttggggcatcgatctgtgaagcaaagcatccaactgcaccaaccctttgttcatccaggtagggtaacctggtcaatatggctgccagaaagcagctgtcagagcttcggaggtgggggtggaaatgtcagcccaacccgactcagcagagggggctcacatttctctaaaccagcagttttcaagctggggctccaacgaccctttcacaggggtccctaaggccatcagagagcacatttaaatgttacagttcacaacagtaacgaagtcacagctaagaagtagcaacagtagcagaccggtggctggggagccccacagtatgaggaacataattaaagggttgcagcaatagggatgctggagaaccactggtctaaactatcccacagttttccaggctcccaggagaacgaactgttccgacctcgcagacacagtgtcctcctcactccttatcccgctttcacccctgccctgggtgtggagagaggaaaagcatgcggaggcggaggcttaaatagaaacctttatttacaagagcatccagacagtcggcaaggcatccaaagctcacccaactgagtcaccgaatggtttccattccttgcggtgtaaagaatgacaccatcttaagtgacacttatataaatgtgattaaccccaaatgtgttctcagtggtgtcggtcagttcctgagaatttactgctcttggagtgacatttccgtcttcttcagaactccttattttcaaaagaagagaaaaagggaggaggcaagagaaaaacaaaacaccgccctgtttttaatcgcctgcactggaggtaaacacacctgttgcttcatggcagggccagattcgagctcacctagaggtctgctcctggtaacactctactgcagatagaaagggactggactggcgtgttgtaaactggaaactctctgcacagtccagctgcacctacccctgaatcaagccaattatgtgccctagtacccactgcctctggccccgacccacctcagcatctaatgctgatgaaccgggtaggcctgttaatgacaggggcacagtttagagagaaagcgttctgataccaacagcaacagtacagcttcatttatttttgaagaaacatgttgccttaatatcatttggatcttcataaaatacatttttatttatatatctttggattcagcaaaaaaaaaaaaaaaaaaaaaaaaaaggtaggtactggaaatgtccccacatcataaaagcagatgaaaagaatacttttataccatttgccccaaggacacctaggtttaaagaggggccagggaggagtggaggcgaggtaggcaagaagagtacaaagagaatgacccaaaaaagatttaaggacaattcaggtaaaaacaacaaattatctgagaggctattaaaaggaaatccgaattttgaactggcaccaataaaaatcagtaagtagaaaatataaaaacataataaacttcatttgtctccccatataaaaagggggtaccaaccagttggcctggagctggggtgctgagggcagaatcaaggtctctccaagttaagggaagagcaccactgtggcctacacctaagcatggcgggctcaccgcgcccagccagatcgggtgtcagcggcaaaacacagcacacaatggaaacgaggacagtgagctgatcatgaccaaagcacgttgagaagccaagtccatccacaggtgcttctggaaatgtgagcttcactcacagagagttcagagaatgaagctgtgctcccttggggggggggggggcggggggaggtggttgggggtggaggacaactggctaaacgtgtgactcttaaacattgactggatctcggacaatgacaccagggctggtggagaaacaaagctacagatggtttactaacctaatgccatctaactgtttgaacctaaggacccaaataaaggcattacacttggtttccctacttcacactgacgaggacaggtgccaagaggaggcagagaggtggcaggaggggctggcatgtgccaaggtgtcactctcactcagtggcactggcaggcctggttctgagctcagcaccctgatgcggagaggtagtaagagaccctatgagctgaaccagaggagaactgggcagacaccagaccacacacagcaagggcccggggcctttgacctaaatgtggggctcaggtcctagtaacagacatcgatcctaaaatgatgagtgggctacagttttccaaaattattatcatttaatttatggactgcttaaaaaacacaagattctttttaaaatcaatttgcttcggttttgtttttagactcttggcggttttctgttttcgtttaaagctcatttccccatatctattctttccccacaaattaacaaagtgcgtagttctctggtaaagaaaatttttaaaaaatttaaatgcctacatctaaacaaatgatccctttaaaaagcctttttaaagagtgaggcctgtaacacgaggggagctgcaggctgccctgccccaggctgggccttccagatgtctccgctgcctgtaacctcactgcgtggagcttacagaaatcaacaatgttaaatatttagcttcacaaactctgtaaaaatgagctgctgtggcctacaaaaaaggtatgtacatattttcacataatacaatatcttaaagatcctatttacaaagggaaggaagtgtgtccacagaagcactgctcgcttctgactcagagtgcaggacctggccttgggtttcacaagtttatttcaaagcattattgctccaccatataggcaaagggtgacgccagtacttgaaagaaacaacaaacaaacaaacgacaatcgtgttcttgtcctaacagattagtgcagacagaaagcaggaatgtggttcaccattcctcacgccctcaggaatattgcatttctccgtgacttcctcagtaaagtgcgcttggctgcacattggggcgggaaaattcaatattgccatctcatcttcccttcttcaaagccatttaacatcaatgacaaatccttgagaattacagggtacggggacctcaccaggagagacctaggacgacagactctggggactacacctgtaaaggacaagagcgcagaaacactgattgcactggacaggagagcgacacgaactacttgctgacgacacgcgagaaggcagactgtgccccctcgtccagtgctgcaagacagaaaccctagccatctagatctacgtgaagactttggctggcgaggcagaagggagtgacgtaagagagcggtgcttacgaacaccccatctccagaatcacatcctcatgaggcagaacaccttgccacacagaggcagggcatcaggtagacagtgcgcttcagcgagacccagctctgctcaaatgacagcacagaccccgctgctggtcacgctggccttgcttccaagctggatgcttagacaatgactcgccgccacgtcctgatgatcctgtgcagtgtcatctgtacagtcagtcccactagggagatgtcagcagtatttctgttaacagaagaacacagggtcagcgcagcagaaaatcggccactgtctgtacactcctgaatgcaccgccaaatgttttcaaaacactgcagtagtttgttctaagttatatacccaagttaaaatctccagaccactgtgacagttctgggaggcgtaagaatagatgcccgtacctgatcggggcccatgggcatgccagacatgggcatgggggtcatggccatctgtcccaagtgcccaccgctgctgttcatatgcaccatgttgtaggctgcagggttcccctggggagcaaactgctgctgggggaaggagctgcaaagaaagggtaacagtgttacttcttcagggaacacagactctcacagttctatcaaacatccctctacctgagcagaaaacacagacatctctgttgttgttgtttgagacagggtctctctatgtacctctggttgtggtctggagctcgctaagtagaccaggctggccttgaactcacagagatcctcctgcctttgcctcccaaatgttgggattaaaggcacagagcaccatgccctatctgagaaaagcttctggacagcctgcgctcacagacatggcacaatataaagcaaccacaaaacaagccatatgcctcagtttctaagagccaagcacatgatctctccatccagtaagtgtgactgagaaacaggttcccggattccccactaggatgtaaaagtaagtcccatccttacccattcctggccaggttccctgacggccaccccttcatatctgaaggctgatacatgggtgtgggctgaggatgctgcaccatggcattctgggaaggccccattcttgatgacatcattgcactgggaggactcgagcctcgaccaaaggctggctctggtggttgtcccattccttaaagaaatgaacagaaatcagtgttcaaatgcagcatccatggactttcagcatcctagaatcaccaaagatggagaaggaaggagaaaaaaggctccacgccgatgctctgtcgttcttgcttctcactaagatgacaaagtcatcaatttagtaaaaaaaaaaaaaaaaaaaaaaatgccatccagggcaccgtggcggggcagggctgcactctctaacaacacatctctgtcccaaaacctccccaaaggtgggcctgaagcaccgcctgcttaatataatcacagtaagtgcccaagtcacagaaaaaagggatggcgaagcccatactgggatctgcccctcaagcttgagtgtccagagatatcacatgggacatgaagaacaggcaagaggaaggtttatgtgatctttttcaaataaggggatgagggggtttgcaggggctaaaaaaaaaaaaaaaaaagtccagctatgggaacacacactccttgcttctgcagcacactccagcttcctgcagctccagacagttttcctggcaaacaagatggagtgagcggtacttttgttttcacactcaacggaactggtgcagcttggggccttactaaccctactttgataagggcacaatctgacaggtttaccgtaatttgctggatatggaaactgttgtggaggggcttgcggcattgctgaacctgccaaaaccccgtccatgctgggggaggcggtgacgttgggaggtgggctgaaggcctgaggctgtggttgtgacatcatcatcgccatcctctgctgctgcaggtgatggctcatcagctctcgtttctgctgggcagccatttgggcattaaagaaagcctgctggtagccaagagacacacaattaacttcatttcatagcatctcacaatacaccagctatggacaagaaagaacagagtgccctctctgtaactaaagggtagtatacacaagcggttctttacacccgtggcttccaaacgctgcccagtgagcgtccttcctgtgcagggtcagaggcagtcccagaatcccaaaacactaggcagttatcttacaacacagcagctcatcacaaagggaatcaatctgggtgagtttactgatggttgtaatcaagtagccacttctctccagcccctcatcacagacaaagcagagtgagagtgaaagaccaagtacaggagctggagacatggctcaattcccacacccacaaggctgctcacaaccatctgtacctccaggtccaggagatctcatgtccttttctggcctccacatgatacagacatccatgcagataacacactcataaacattaatatatatatatatatatatatatatatatatatacacacacacacacacatatatatacatacatatatatatatagagagagagacagtgtgacaaccaattcttacaaaaacttcagaattatttaacaggcatagctaaggccaggccgggcgtgggtcccgcctggactggccccttctctgcagggaacgtacctggggcatcatgggcctcatcacagcagtgccagcagggttctccattttcatttcaagtgcctgccggctctgatttaaaaactgaacagagttgggttagtaggtcaagtggagcgtgttagtgagccccaatcagctttatacactacccccacccagtgagatctctccagacccaccaagctagggagccacatttaaactgaattggttcgtcgtcgtttacatcctgcagaaggaagacagctctacagctgagagcgtgcacagtccatccactggaccagattcctttcccagcacctacatggtggctcagtcaccactgccccagttctagtgcacctcacacctctggcctctgcaggcgtgcatgcgtgcgtgcgtgcgtgcgtgcgtgcgcgcgcaaacacgaactgcacagacactattaaaaatacaagaaaccttaaaaaaaaaaaaaaaatagaaaaaaagttcgcaggacagagttcctggacagcgacattggcgccgattccctgcctcggtgtgaggcttaaacaactgcagcaggaatgcagtgtcaagtttctccagggactgttgctcagacaatcaaaattactctgacttgatcagacactagtgagcacttaatagaaaggaggactaagctataaaatagtaccatgcgcacaggcacagagcttccccagttctgagcctgctgcaggggctgccatagcctggctctggcttcctgggctctcctactcaggtgactcactgccacctggtaacaagcactcaccagcccgtgcaaccatacaaatatgctttaaagcaactgcagattaaggaaagaggagggtgtggattccctagaactgaggttagacagtcagttgcccacagtaggtgccaggaactgaacacgggtcctctgcaagagcaacaagtgttcttaaccactgagcatgcctccggccccaaagtgcatcaagaagtgatttccattaaaatactgagtcaacaggggtgcttaacgcattgcatgcctgcaatcccggcaggagaggttgagacagaagtggttacaagtcccctagacaatcatcaagatcttgtctttaaaacaaaaagctgaggaaatgccttccaagggccatcaagacacactgctcctcctgctgtcctgtcctgtgtcaaacagctcactgtgctgtcctaactggcctggaactcactctgtagaccaggctgacccatggaactcacagagacctgtgcttctttctgcctctcaagtgctaggattaacagcatgcactaagcaaggctctaagaattaaactggcttgcctggcttgcttggaaagtacatttacccactgagccattttgccactgctaatgttatagcaaagaatatacatatagaaagatacccaagtttaatacacactccttatcaaggaactgtctgcataaacaaaatcttacagagaagtgaaagcaaaagggattcctttagttagcaaagagtggagagccggtggcaagggccacggagagcacagcctaagagcccctgacagcccggtcttacctgctggccctgtagcctctgctgaagctgcattctcagctgcttcggggtgttggtccttggtctcacgaggccggctctaggatgcatgccttgcagaggaaagctgccttgctggctaatctgacccatcatagagttaaacgatggtgactgtccctgaaggttaaagcctccttgaaggggaggaccctgagctgggtatgtctgtccatatagtgcagccttctgatccatcattactgctgcttcttggccttggaaaacatcctgtttggactccaaagcttgtcccttaaacatcaaacacaaaggaatggttagctacacctgagaaagcaaccaaaagcaaatgctgcaaacaagggaaaaaatgtaaatcagtacatgtgaccggtggtggctcagaacccagatgcctgaagctgcatctgcactgtgtcttgtgtactcctgtgtagttcagaactcatgtctgtagaatgggacaaccaagtctcaaaaggatgggagaaaatgaatggtgatttggttgaaatgtagtaatgaatgtaggtaattagattctctggttttcaaacatcaaaagaaaaccagtgtagggctggtgagatggctcagtgggtaagagcgcccgactgctcttccaaaggtcaggagctcaaatcccagcaaccacatggtggctcacaaccatccgtaacgaaatctgactccctcttctggagtgtctgaggacagctacagtgtacttagatataataaataaataaatctttaaaaaaaaaaaaacaaaagaaaaccagtgtattattttaatgtttaataataaataactctatatagtggaactgacataaattatgggttgtccaggtggctaaacaagtaaaggtgcctgctgcctgagttcaatccgtggctcccacacagtggaataataaactcctggaagtggtcctctgactccacatgcatagcagggtcttttaagtgcatgtatacatgtacgctctcggcctttttggtagctataatgtgtttaatacctgaaaagatactattggctcaaaaccagagctctatacactaagaacccttacttacacacttacacacacacacacacacacacacttacacacacacacacacacacacacacacacacacacacacactttaggactggtgaaatgactcagtgccactcgatgcctctgccacaaatgctgacagttgactcccagaggtggtcctctgagctccatgtctgtaatgtgcatgcaatctgcacagacacacacaaaataaagtgtaataaaactttacaaatctgttgttctcccataatttgtgaatagcaagagatgatttaggtaataataggtcagccaggaaaagcacctctgcagatctccatctctgagtgcactccccagttagacactaaaggtggtcactcaccactgatcctcaacaggtctacttggcaacagatggcatgttccaaaggaaatgtcgggtgcactgtgcacctctgccttctcccaggcccccaaaccaagaacacagtgagcagcctgtcctgcaattctgctctgccacctatgctctcccactgcagccttcccttgcttgggtaagggtcgagtgtacactgaagttccttctcaggttttcctcttctctcacagtgtttcctgtctgggtacgctcagacacagaggataactagctatcaaattatgcgttctacccgaaacatttctgaactcacttggcttatgcaaatgaatctgggtgtccccagcactcaaacttagtctgcagagtagaaatcacgaatttacaattctcccacttccccactagatagaaaagccgctttcctccaatctccccaggactccttcctcccgcctcctcactactcctcactatccttctagtctacgaggcccactcccaggacccttcccatgattcctgtggacccttgcagtgacgggtatttatgcttctactatcttatcattccaacctgctcacaccagatacaacatctttgataaagcagttatatgttacgttgaacacgcaaactatatgtgtgggacagtgaagggcagcctgttttggttgagcttgctcaggtgacccagtagagggagggaacagtgagccacgttcccagagacaggtgcctgacaccacagagcccccagctccataattctgtgacaatcagtcacgcaaacaaagccccaagctcctggcattctagctagactccaccctcacagttacctgacattagccaggagtgcttctccccacagctaccctgcaactacaagatcaaggggctgcttggtccctcctctctcttaagctctcacctttcttactcacccgcatccgcaacggaactctggtgggatgcaggttctctcccactccctatattcccccacacccacggccctacaacatgcattcatctcccttctcttgggcagactactaaaatgaatgtaaagaattcagaaggttctgagacccaacctaacccacagtataagcagaatttagccagatatccgagacttccatgcagccgctgctggccactcacagtagaccatgtcaccagtccccgggctatttattcagcatgttctacacttcctgtctggatcacagacatcatcctacctactgtgctgacaattcccgtaacactttcaccttactttctctgttgtggcatgtgcacatgtggaggtcagaggacagctttgtgaagctacttctcgaattccactttcatggagaccttgacgcgtcgtggtgccagtttgggccagcccacagaacagtacttgctagactatctgatcactgtgtcgcttgtcacctatggctgtctttatagatgtcttagataccatttaatgcttcccagttaacaacctcgcttctgagatttcaccagcattttactgttataataaattactgtgggtattaaacacaattttgaaatttttgatggtgtgtgtgtgtgtgtgtgtgtgtgtgtgtgtgtgtgtgtgtgtgtttgggcgtggggagtctgttttatttttcaagacaggatttttctatgtagccccggatgtcctagaaccttgtagacccggatagcctggaactcaagggagcagcctcctcattgctgaagctgaagctgtgccccaccatgcccggcaacactcttaagctggaaataaagctaaagccaagccatgacaaagaaggaaggagcagcaaacgctcacagtgggcattgcccagcatctgagtgtcacgctacaaatggccagcctggtaacatcaacactgcaaagactcggcatgagctctgcaccttcatgaaaccagacagctcagcctgaaccgccatgccagctgagcctgaactcgctcacatagcaagaaaatcaaaaccccattagaaaactctagagcacagatgcgtggccagcaaacaagcttgcaagaaagtatagtgagagccagtctatcatattagtaaatatctttttaaataaacacgctctgttatttgtgtggtcatatgcctaagccacacaatggagctgagagagaaaaaactgaaactactcatctagaaaaacaacaaatgccattttcctttctgtgacaaggtcctgatgtgatagaccagctatccagttacaaggtcattataagttcatttctgttttctgtaaaactttggtttaaccatgtcttgacccattttctggaatttgacatgttccacaccctatcccctaaccttcaccctaataagatgctctgccaaataattttgagtgttctgccaagttcctacagaatgaaaaccccttgagagccccctagacttgaagttttgaggctctctcataaaccctaccttctcctacgtccaatgctgttttctcaagccctgctttagagaaataacactgtctggaagaaaatagagcttgcttcatttgaccaaagattctgagtaatggctcttactctcacttggtctacagagttccaagacagccaggaggctacacagagaagaaatcctgtctttcctgaaaaacaaaataaacttgtaaaagtgtattttcatgagatgagtatacaaagaggcaagagatgacaatgacctaatttgccactgtaaacatgtttacccatggcctgcctcaccagcacactgggcacacctaacaggttggctacagactgaagaaaaagttataaaagtaagcagcatttggtggggctaagagaaggccacctcttatttatttcatgtatgagtgcaattatagctgtcttcagacacaccagaagagggcatcagatcccattacagatgattgtgagccaccatgtggttgctgggaattgaattcaggacctctggaagagcagtcagtgctcttagccactgagtcatctctccagcccaagagagggctcttgacaaggaccctgttccaggtcccagaacacacattttagctcagaaccatctttaaatccagccccaagtgagctaatacccttttctaacatctgcaggtaccaagcacacacatacgcacataagcaaaacacatacataataaagtcaaattaataaatctaattttttttaaagttaggtaattattattagggccagagatgtgggtgctagggtctgttcctagaactatatggtagctctcagccatctgtaatttcagtcccaaagaatccaaaactctcttctggcctatgtgggcacaaaaatgtacatagtgcacagatgtaccagatgtacatacaaacaaatatccattatcataaagttaaactaaaaaatttaagtaagcagcattcttaaaactagtgttttcattagatgttttctttggctgtagtaaaacaagggacaaatactcacactttctcacaagtgacacaaaggtacacagtctaaatttaagctgtgtttgtctccatgaatatgaagacatactcactgccacgctcttcagctctcacagactgcaactcacctgattcacgagctcaggaattcccaaggccctgtcgatctcctccagacctgtggcatctgtgttgctcaggagtgtgtgcagctggtccagcagagctctctcgtcactctggccctctgcgttagaaggtggcccaagcagatcatccagagagtttctaagaagaggcctagagagagacgtgagtcagctccaatgcagcttggttagagttggtgaggtcctatgttctacaccaaggaccacaaaaaaaccaaaccagtgctcttctgatgaagagcttgttaggcttttaagttttctgagagtctagcctcaaactcacacccaccagtctctcctatttagtggtaaatgctgatggtaatacaatgcccacaatgacactgaagtatgcactatgagatgtatgtgtttcagctgacctctagcctctgcataaacacagaatttttaaaaagaagacatggctgggatatttctcagaggtagtttattaaacaaattaaagctaaaatgtagaataaactcccagtctttttctttcattaaaaaaaaaagtaaaagatagtacaatagttcactcccatctgtactactgaaatgttgtagatgattttaaaagataatggagagatggctcagcagttgtgagtagagcaagcacaagaaggcccaagatgcactccagtcggggacctggcgccctcttctggcctccttggacactgcacaaatgtgatgcacagtcatacatgaagtcaaacactcaacccccgccccgcccccccccaaaaaaaaaactgaggcacagtatctgaatagccccccatggcaggtctgggtaaagtggcactgtaatcggctccatgagaacatgtctttcccaactgctactaatgcatgggagattactgctaagaagccttttggaagtcttgaaggctgaactgtagttctgcctcctcccaccctccagatgcctctgcttcctgcaccagcagatggcaaagtcaacagtctctccatactctcccagggttgctcctgcccacactcttaaatccagtgcaagcattcccacatcccaaaataaaaccctacctattttgagacccgtgaggaccttgttccatagagagcatgccctctggccaggaacctggttggttagacggcactgctgggctatagggattgactcccattcccatgggaatctcaccagttcctgggggagcaaatcaaaattttcagccaggtggtggcacacacctttaattccaacactcacaaggcagaggcaggtggatctctgagttctcaaggtcagcctggtctacagagtgaatttcaggtcagccagtgctacacagagaaaccctgtgttcaaccctgcccctatgccgaaaaaggggatttccattttttattgaaagggacagcttactcatttgaagcatctgctgctgttgctgctgctgctgttgctgctgctgttgctgctgttgttgttgctgttgctgctgttgctgctgctgttgctgcaacgatggtcttgcacctggcagtcgattagaacgaagtggcaaggtaggcacagagccccccatggcaggtctgggtaaagtggcactgtaatcggctccagttcttcccaggggacttgatgccagaggctccattctgctggcccttgagttagctaagccccagtctccgggggaggaagtcggattcacaggaacatttctgtttgggcctaaaattagggagggctcatcaggtctgacccagcacatcacacaaaagcccttcgtgcactgggagaaccattatttactacagtagccaggactgtcaccctgagagtagggctgtcacctacaaagacagtatctagaagcctctactctcacgtatttgttacaggttagaaaggtgttctgaaccaacgggatatttaaaagacaccatggttcaatggaaggagcactatattaaaaatatagtaataataacttaaaatattaaggctgttacttgagttccatgtttaaggaaatgaccacacttagacatgacctacccatgttggcaccgtaattctcctgactatccatcattcttggattcccagccagtatgggctgttttggtaacccagggaaagcactgacattcttcactggcggacctgagccaacagacacagggctatccagagacaccgctcggttatatggaggacgaacagactgcacaggctgtggacttcgcaaacctgttgaaaacacagaagcttgccacattagtataatcaagggcaactatcaaacactaagccccctacaaaaagcctttctcataaaaacaaacactaccattttcttctacaaaataaatatttatgtcaaaaagaaaagaaaaaacccaaattccaaataaagtacaaacaaaagtctgtatgttggccaaagtgctagctagcattcagctgtagccgaatacggtcatgtccaatgcctatctcagaatgccacggcaaggctgagcactgaggctcagtaggccatgttgaaggagcatgagactctgaatgcagatgcccaacaacacaaaggaaggagggagatggagacagaaaatggacagatgcttttaattcctagagatgcttccacgtacgcacttatgaagtagattctctacttacaattttacaataaaaacaaaaagttaagctgccttccaatcaaataagtgcacagtttcttcccaacctctttgactaatctgaccagtcagtttaggaaacagtaaaactgaaggtaatgagaccctgttgcaaaaaaatggagggagggagggggggagggagggaaggaaggaaggaaggaaggaattaagtaagtgtggaggccatgcctttagtccagcactcagaaggcagaggcaaatgaatcttggtgatttcaaggccagggttaccctttctcaaagaaagagaggggaggagaggagtctgatgcaaaagatagaaagaaacaaagaagggggagagaagggttcctgcaaagaccaaaacaatgagaagaggcacctctcagggttaaatacaaggaccttctttaaggaccaaaaatgacatatttaatccagtttgggtcatttaacccaattctccatgtttaagaagaagtctaccccaaggcccaggtatgtgttctctaagaatcataattactgagccggggctggtgagatggctcagtgggtaagagcacccgactgctcttccgaaggtccagagttcaaatcccagcaaccacatggtggctcacaaccatctgtaacgagatctagcgccctcttctgcagtgactgaagacagctacagtgtacttagatataataaataaataaatcttgaaaataaagaacgtcttgtttccaaaagtattatacttaatttaaaaaaaaaaaaaaaaataaataattactgagccgggcatggtgatcccagcacttggaggcagaggccagcctggcctccagctgcttcctggtcgtggtggaagcgaacatgcgactgtaccgagtgaggagcacctgcattgggacgtctgtctctgagcaacctcggctcctcacaaagccccacccaacctcacctttcaaaaaagaaaaactctggttttccttacccagagaactcggtcctgcaaacatctgctgtttggcccctgggtgaccgccatttgtaggattgttgtagaagtcagaactggtcaaatctccaagaatggcatctagattatccaggtctcccgatacctgaaaatgaaccttttaaattattctgtatgtaacaccagatgcagctatcaaggcatcagccaaaaaaaaaaaaaaaaaagaacgactggtagtgcgcacattgaatcccagcaaactaagttccgggacagccagagacagacagtgagactctccctttccaaagaaaacagaccaacaacaaagcaagcaaacaaacaaaaacaaaaataagggttggggatttagctcagtggtagagtgattgcctagcaagcaagcacaaggccctgagttctgtcctcagctctggaaaaacaaacaaacccaagcagcaacccacaagccattaccagagataacaatgaccaggacagaggctgctgtcttgggacacacacatacacacacacacacacactatctccaccttcactgcaaggatagccatttcgataaatccctgggctctgctggcccacactgcactttttgctctgccactatttcccaggacaagtggctagggaggattcatccttagctggcagaaacctccacctatgagtaacttttctgaaaatgtattggtaagtggtgtttaacaaggtattcacaggcacacagcaagggacccagcttggatatggtgaagagaggtctgtgccctatcctatgaaacactagtctttcttgttcttgctagaagagtgcttactcttagtaagatgcatttgtacaacatgcaatatgcatgaaaaaggtgctcgctctctctctctctctctccctctctctctctctctttcgtttttcaagacaggctttctctatatatatagccctggctgtcttagaactctcactctgtagaccaagctggccttgaactcagaaatccacctgcctctgcctcccaagtgctgggatcaaaggcgtgtgccaccactgccaggcgaactctcactcttgaggggggggaaatgatgctgataaattcaaacttttcccaataacatctaccatgtccttaacaacctaaactgcttattccaacgtagccacttccatgaaaatacttctaactggccactaaaaacttatttatagggccagtagaatggttcagcatgtaaagatctttgcagagcaaacatgacatcttgagttcaaccttcagtcccaccaccccctcacacacacaaactgtctgtctgtctgtctgtctgtctctctctctctctcaaacacacacatacacacacacacacacacattctctctcgcgcacacacacacactcaaactatacacagtaactatatagtgaatgaaacctcaaggttatccttcaattaaaaactaaccatttatgttagttattaacaattgtaatgtataacaaggcaatgtttataacacagaaatgaagaaaccaatgaagggctggaacagagagtaccttacctcctcgttcgtctcggtcttaattttggggtctttctcttggccagagctgggattggtggagcagctgcactgactcagtttactgtccccactgtcggcctggggctgcagctctttggcaagcacatcactggggtcatccctgtccagcaggtatctaagcagagcattattctccttcttcttaggactcagctgctcctgcctggttgtcccctctccacaggaagcagtgctgctcgtgtccttcccagtggcctctgcagtgatcttggcgacctccgctggggagttgccattctgcagcaacttgtgcaaaatccggtgtttctcttgcaacagagacccatgcacattggaggtggaagacactgtccctgatgttgaggaggacactccagaggggctggtgacactaacggaagagtctttgcagtttggatccaggggagagttggtcaaggaggaatggcctcggtcgtcggaggagcacgtgagtaactgcagcagtttcttgtggcctttgctttccagaggtcccctgggcgtctctgacacctccccactgctctccttgctttctttttcacttgggtgatctctgctgtttgactgacacactgaactctccactggattctgttcacagtataagcctagggggctcttagagtcctgaccactcactttacttggctggcttatattcatattgggagaattatccagtttggggcctggtgaggacagagtagataaaagagaggtccccacgccttcactgatggcttgcaaggcactgagggagctgctagaaaagctgtggctccctgtgttgccagaaggtcccatgggtgagtgtgcacctgcatatggagaaaggtcgtgagagatggtcagacacaacctcttttcctattaccaaagacactggtgaggaaagaaaagagaagcaaaggaaaacgcagctgtggatacctgcagcaggagagaactggtgggaggccatctttgggctgccacgattccgaggggaaatcatgatgttctgctggttgggaccaagaccaggactgccgtgggggggactgctcatgctgagcccatagctgctgttctgataggaagatggcgactgtaggctttgtcctggcgtcagtgaggctacgctactagaagccccgtacctagctccacccatctgccctgtgttgctggggtctggcacgccataggtccggctgcccatcatctgtacattctgatttggagacatgctcacgccacaccctgctgcaggaggtcggatgccttgtcctgcgggatttgggtttggtctgtatccattctgttctctgcaaacaaacacacgcaagttttcctttaaaagccagcaagggaaggaagagagcgggaaggagctgtccaggagcagacactaggcgtcactccagtaccaagtgggaaacccaattctggggctacaccaagccaacccagcaatactctgccttgcttttctagcttatagacatatttcgtgtacactggtattttgtctgtgtgtgtgtgtgtgtgtgtgtgtttgccatatgcatgcctactgtttgtgggggtcagaaggcggcattggatcccctggaatcagagttagagagttgtaggtcagcgtatgggtgctatgactcaggtcttaagaacaggtgtccttagtaactgagccatttctctagcccctccttttcctgttttgatatactggggatgcggagtctcctgcacgctaagcaagctctccagtactgagctctactccaaagcccattgatattttgagacagggtctcatctcacaaagttaccgagtctggtcttgaactcattcattaactcagccaggcccagaacttgaggtcctgctgctgcctcagcctcccatgtagctagggtaacaggtcacaccaccagatgtcaaatatggtatttgtttgttttggtttttttttttttggttggttgctgtttatttgtttgttctttgttttgagatgagcttcgaagtcactatgaagattttttttgcctctatctctcaagtcctggggaaaaaccacaggagtttttcccaaactcagtttatactgtgctgggaactgaacctggggcatcatgcaaggaaggtattttaccagctaagctgcatccctaacagtttagatgagccacaagatctaaatgagtgacatcagtgctgagtggctctgacagacatgtgctatggagcctccaaggcctcattacagccgaccatatctggggcttggccttaagacagtcaatgaatgaacctcttcctatgcagtttgttcaccattagtaacatcagtaattactaccttttagtagctagtaattacatttgtattctaccttctattcaaactccagtccctggaagcaatgtaaatgtaacactagaagtgaaaggtaacaagtccactactctcccatccaccaccctcacctcagcccccccacacacacataccctggccttaatcgggaagcagttatttagtagaaaatactaatttttaaataaaaatataaccttaaagaaaacatactcttaagaacctaaattcacttcacgaaatccaacagcttccctgacttttctccctgcaaatcaaccgcaaagcatcgtggggacaagggtgctttagtgtcatcacctctgaagaaagtgggtcgagatgaagccgtgacgatcattcgttacaggattgcggaagagtttgctttttgtctgcgcactcacaatagttccatcagccaaggagaaacgatacacgggggtctctgcgtggccatgaacataagctacggagggggaagcacactgtcactagcatctgagactagaccaaggcagacaggaacagacgaggaggaatcacgcttcgagtacaaaattgtgttaaattacgcggaaatacacaaaagtatagaacagctacgctcagaaaccactccctctcccacaaccaccaaagagcaggacgaggactgagcacacagtgagtgctttacagcaccatcaacatcagcaccaagatccaccccaaacgcctccctcaccttcttgatagtgacgcttctgggaccatgactgcccatcattcagactgaagaacctctggatacatcttcggattatgtcttcaaagccaggcctcatggaagatctaagtgagtttgtatctatattgacaacctttcctattaaagataaaaacagaagattctaaccctgtccagaagagcctactgctgcttaactgactcgcatttgagaatgacataaaggagacaatctcagctctgccttctgtccttcacacacagctggtggctgctctcctactagctgtaagcaaagctccttgtaagaagcacgcctctgcacccctctgcaccggatgagccttttataatgcgctggtgctaggaagggtatttgactatacttagcgtttacttagaggagaaaataagactgccaaatcagagagacacagaaagtgagagagcaaacactcaagaagaggctgattccgacagatcacgtaacaaatagaaatgtatgtctggagctacagagagccagattcactctgagcacacaggaggagacctaggtggcgaggcccagcgtgtaagaccgggctgagaaatggagctcagcgtgtaaggtgcttgctgaggacctctgttccatgccaggagccccaggtggaagaagagtgaccttgtcaaaagtgcacacacttgtgaactcacagaaccagcagtgcacacactcatgcacacgcagaaccagaggaataagaacactttataacgtttcccagtgaagactggtcttaccggaaaggtcatgtctggtaataaagctctcaggactggatgggaatggcgcagtcacgcggcgagccacgcagatcatacagcactgcaagtctacaacgaaaggtcaccaggtcggattacagtggctttagctgtgactaacgggcgagcaggaatacaacatcagtaagaaaggttaggatcagcacagtggacccgcctctcaccttctccttcttccagcatagcgcgaggctgagacagggcaaagcactgcattgtttcatatctctggcgtgtttcgggactggcattcacgtcttccaaaatgtcgtgtgttttcatcaacatacgacaattaaatgtatggcttttttgtctctggttctcattagtccaagaaactccattaactttgaaaaacaaattaaaatttgaaaacaaattgaaattattctttataaatcaagtaaagctctgtcaaaattaattaaaagagttcaagctagcgttgggccttgctctttgcggaggacctgggtttagttcccaggtggtacagtcatccacaactccagttgcacggaatctaatgcactcggctggcctttggtgcacacctcatgcacatacatgcatgcaagcaaacttttcattatatatacagaatttttaaaaattcaagctaggggctgcaagggcggctcactggttaagagcacttagttggctcttcccgaggaccagagtcaggcagctcataagcaccttcaactcctgcttcagataatgtcctcttctggcccccatgacactgcagtaacacatggcatacattcacattcatacatacatgtaagggttttcatatatatatgtaaaatcttttagaactcatgctataaagtgagtgtggcagggcaagctgctggcccagctactaaaggggctgaaaaagaggactgtggcacaccctggggcaatacatgagaccttacctagagcagaagaacagggtccagctatcttttcttactacacaacacccatgtggtgacacctaacatttcagaatgacagtatcaagatatctgagtaagttcagcctcatcaaaagtctactgaacatttgggcaccatggaaaacttttgagtacactgaagccaaactgaaaattttgctggcaatcacttattaagtctcattttctggcttcctagaaagcacatccaatctctgaagaaataactaagaaaaattaaatatatatctagaaaacatgtttatatgcaagcctgtagtcaggcatggcagcacatacctataatcccagcaatgtgagacaagacaaaaatagatgatcatagattcaaagctagtctggaccacacagtagggtaggaccacagattcaaagctagcctggaccacacagtaggaccctgtctttccttgagaaaaccaaacacaaagaagagcccacctgtggattttggtaagtgtttaagaaaatccttccggtcttgctcatgtaagatgctgtagacacttgtgttaaccaggtcctcctgcttgtactgcagatactgtgtgacattttctgacacgaatacaatgtttccatctcgattcaccacaaacaggaaaccatccagtgcctacagtggaatgtgttaataatattatgaaaatcataaccccacaaaagcattaaaccccctcccccccatttttgccagggtttgggttagggttcaggttagggttatactggcaaaatagagcatttaaagggtcaatagtattaaagaggaccctatccaatacaactggtatccttataaggacagattaaaaatacacaggggaggcatgctcagggaaaaaggccttattaagacacatagcgagccaaggagagaggactcaggagaaagcaaccctgccaacaccctcatcttgggctccagtcttcaaaactgaagaaataggcttctgttgtctgagtcatctactctgtgacattgtcagtgcagccttagcagaggaaggctacagcctcgtttgtaagaaaatctgaggggggggagaagagagacacactagcccaacatttagagttaactgttctactaacattagcatatttcagagcatacaaaaatgtttaaaactaggcaagtagggaatgacatattatacacctttcaccccaacatttaggaagtggaggcaggaattgaggtcaccctgatctatactgcaagttgaaagacagcctgtgctaacattacaacgtctcaaaacaaaacaacaaaaaaagcctgtatgttttgggaccttaagaaacaaagaaaaaaccaaaaaaacaacccattcttaatgctgcccaatttcccacctgacctcaagttaagccgcaggattcctatctgctcctgaacaagagcttaaaaggatgaacacaaagtagtcgaaatgactcactgaaagaaagaccagatgtcaagtaaacttgctgaagcgctctccggcctgaagtagacactgcgccatggttaatcagctcttcccaaggcaattactttaaaaacatgcacatgtttaatgtttgaaattgcctcacaagctggagtgtagctctatcacagagcacatgcctagcatgcatgaggccctgggcttccctccccagcaccataaataaattctccaggaattcagagccgagggcggaggatgtcactccgtgctaacatgcttgcctactatggtcacctagtatgtgtgaggccctgggtttaatttcaagcacagcaaagaaagagtaaaactgtagtgtactatgcaagcattcatgggaaaattcatagaaaggtctgaactaaaatgcactaagtagcacctctacgcgttactgactctatctcaaagagtgtctttgcttttgtgtacatgtgttgtgtttttgtgttgtacacagtgcatatacagtattatatatagtgtcaggagggtattttatgagtgctataatactgagctctgctccacgggggtagaaactatctcctcatttccaatctcccctgcccccacacacataaatcacagagtacaacaaccaaagcatgacatgctttggacagccacaatcctcacacctacctgtagtaaaagcggtcctaaagagtctttatcaatgactccctgccctgtagaagacacatcagctttttgaacatcatcatcactggaaatagtttttcctgaagacacagaaggaagcgtcgtgttgagcagcactacctcagcccttacacacacacacacacacacacacacacacacacacacacacacacacgagagagagagagagagagagagagagagagagagagagacagacagacagacagacagtatgtacatatacatgcagaacactcactagctgataagagaaggcctcaaggtttcccaggaaggtagaagacacctggctggctcccttcctgctcccatgctagcctaagggccctagcttgcctcccaccagcattccgcgttctgaagaacatcggtcttctgccaattctgttaattgtttcttaaaagtaagagctggtcaactcatgggactttggtaagtcttacttaacacaagtgaggctctatttaatctccttgatccagaatgggggagggaggatttcatacatattacaagtccaacacttgggtgtttttctgactctgtgttaccttgttcttttatttgccgtatctgtctcactgtctcctttaggatggcacatttatctggcttgacattgaagttgtcgatgtcgctgagatttgcagagatgagctctgccagctcctctatgtacttgctctcctgctcccgtcgccacttctcaccactgtagacaagcctggaaggcggagaaaagccacaacttacacctctcaagaaaacttaaagcagaatccgccccatattatgcattagttttgtgtgaaataaactaaacttagccaacaagaaccatcaaagtggtggcacaaagtatacactgaagaaattccttgttcagtgtcacctttgattagtccctggccttgagaaacatctggaaatggagatgatcacctacccctgtcctggggcatcacagggcagtttgcgtttccgagactcagcggccagcggatccaaagagctttcgcctagtccactcatcctgatcacagatcagcaactgcggaagaagaggtgacaagattaaagcacaaaaacaggcattttctacgaaggtgtcacatggtggaacagctgtatcctgtggtcctggggtatttctgtatgaatgagtgtgtctgcacaagctcagagctcagatgcgttgtaattatgctgggcatggtggtgccagcctctaaccccagcactcagaaggctgagtcaggaacattaaggattctggttaagcctggtctacaaagcaagttccaggccaatctgggcccagtgtcaacttatatttcacaaataaattatgtttaataaaagactatagcacttcaatcttgaaacaattctgaattttatttataccaaggtaataaaagctaacccagtgatttggtaagaacacttcaagtaatgagcccagactaggctagaagattggttttgactttctgtatatgagtgagtgtttgcctacatgtatatatacatatgtatgtgtgtgtgtgtgtgtatatatatatagctagcatgtgtatgcagtgtccccacaagccacaaaaagtcgctgtcaatcccctggagctagagttaagaggcagtcatgatctaccatgtgggcatgttgggaacagaactcatcctcctgtccccaggctcttttcctaggtagcacttctgtccactggatcgtttctcttccattgttaagtccaagttagcctagactatattaacatgactgtagaactaccctacgttcttcttaaagcataggtgcaaagccagatacacactatacgacaggttgccattaagtcacacagcagccattatttacatactgacggctggaaaaataatgtatcttggttaagtttcgcacactaagacgataaatacaagttatttctttttgagcttataatgtcagggctctattcagcctcatttactaactaagtggttaactcgtgcgcgaacatgacaatcactggtctaaagaatccaatgttgcatcagtattgcagccagccagcctgcagttgtgccactaggtggcacaattccaccacaaaggccagtttaaaaataaaaataaaatgtaaaaaaccccacatgatcaaacttaaaatatgtaggtcatgtttgttttgagacagggcctcattgcccagactggcctggaacccatagttgtggttggccctgagcaccaatcctcctgcctctgcttcatactgagcaacaagtatttgccgtcctatctgtggtcacacacaccttttgaaccctctacagtgtcagactacagcatcatgtagacagacaaagtgttaaacagacaagtgtggttctagctgtgttgtcaatcagttcagagattatttttttaactgagcaacattgagcgcttacatacctatctttacttaacttattccagaagtctaacattatcttcttgcccttgtgctacatggactgcaagtccacgtggagaaccgtcagtgaagagcagttcatggtttgatctgtactccacaacaggtctgactttgctgtgcaatacagcatacagcaggaaatgaacatcagtggagtggtgccaactcaatgtaactgaatacacaaagactggcagtggctccctctaaaaacattaaaatgctggttacggcttaccgttaaccagcttcctttttgttatctcagggttctgacaggagaacatgcttgctaactagcccgaagcacaaggacacatggccaaaaagaagaattagtgagaggcctcagagggcagaggcactctcttgcctctttcctggcaaccagagatccatcctggggcccacaagctagaaggaaagaaccatgttttctgtacaatgtttgtagactgagacctgtgtgcatgcacaggcacacaaacgtttaaaaaaagattaaacaaaaaatatcaatgctggtgttctgtttgagcaagttattttaaggtctaagaaaaaccttattgtaccaaaatgagaggaggtaggccatccaaggataaggcagcagagactggttaagccttccccttttcctaacttagttagtaacagagggagtggatgagacagagcagaatggcactgaactaacatacactgggtggttacacatggtgacccccaccacacacatgtgattagttctgttctacagatagggaagtggctaaatagcttgcctagaatcattactagatccggatggaagaggctatgacatattccataaccaaccaagccatcaccagagcaaacgattcatgactcattccctaagtcaaactccctccacccagctcacaaagcttcacagcttaatcaggaaccacataaagtgctgtaacatctgctggttaggggcatgaggtaagggtctgggcaggtaggggttacctccacaggcattatgcctcctcctacccaccactccccatgacactgcctgaaccatgctctgccaggcctgataccaccctgtcttccacatgactgtttgtgtcttctctaattaatctttgtctcaaagaggcacatttttcaaagtacctctggtttcctgcaagtgacaatcagacctcaatcctatcaaggactgtccaggctgcaccactgaagagcacggcctgacttcactgtactacaaaaacatgtgcacatataaactgtcagtgagggccagcactggataaagctggcctttccaattagatgtgtttactttcaaatagataacatttcattagaagtctttttgtttgtttgttttttcccccaagacagggtttctctgtgtagccctggctgtcctagaattccctctgtagactgtagactagggtggccttgaactcacagaaatctgcctgcccccacagcctggttcattatatctttttaaatctacattcattcacagcaccaatcattcatcagagaagacatttagtaatgaatcaaattcaccaatatcatgttcaaatgttatcattggccatcagacttcacctccaaagagcgagtttaccttatcactttcaaaacattgtctgccaaatatacaaacttgaaacccatagattgtcagtcactgattcaattaaaaatagtattttgaggctggagagatggctcatcagttaagagtacttaacgtctgctcttctaggtatcctgagctcaattcccaacaaccacatagtgcctcacaacctatactgggatctgacatcctcttttggcatacatgtatatagaacattcatatacataaaataagtcttaaagaatttctgaggactcaaaaactaaaatagtatttcaaaccaggaatggtggtgtgtaccttcaatcccagcacttggaaggcagaggcaggcaaatctcttgagtttaaggtcagcctgttctataagagaaagttccaggactgcaagagctacacagaaaaaccttgtctggggtgggggaggaaagacaaaacaaaaaaaaaagtattttaggggctggaaacctgggttcaatttccaaaacgcacagggcagctcacaattccaattccagagcctctgacaccctcttctgacctccacaagcaccaggcatgcacatgatccacaaacataatgtgtaggcagaacaaccataaagcaaaaattaataaatctttttttaaaggtgcttcggtgcgaagcaggcggctcagccagtaaaatgcttgcctgaactcaatacttcaatctacataaaagccaggggcagtcatgtacacttataaacccccgccccctgtgttggggggaggggggtgatacacgaatttgggagtactgggcaggctggggaagaagacacccggggctcaccagccagccagcctagcctaattagctagtctcaggcctatgtaagactcaaaattaaagggtgtgtgtgtgtgtgtgtgtgtgtgtgtgtgtgtgtgtgtgttgataaagtacatgtctggctaccacgcctcatgacttgaactcaacctccagaagccacagggtagaaggagagaatggacagactcccagcctcccagaaagaacaactcctaaaagttgtcctgtgacccctccacatacacgccgtgtcacgggcaaaccaacacactaaataaaacactcgttcaatcttagcactcaggaggcaaaggcaggctgatctcctgtgagctcaaggccagtttggtcaacatttcgagttccaggccaggcacagctacacagaaagaccctagatagatagatagatagatagatagatagatagatagatagatagatagataaaacaggttgttccgcacccaataagaggttgtaggctacaatttaaaatagtgtttttaaactgaattaagagggctgcgaaattcaagaaaataagacattcaataaccatataataaaatcttctaatcaagttagaaataaatgtccaggattaataagaaaagaactgatgttcaaggaggggtgcacttgcacttgaacacagacaaagacatagtaaatgtgaaaaaattatcaattttcataaatcacaaagtgtgagacaatcccatcactcattgtcttaaatagatctggtcagcatagatactgtgtgaagccaaagcctagcaagcagataaggctgcacacacactcagcaggcacacacactgaatcacacaggcttatcagacaaaccaagggaagaggaggacctcaggcccatcgcagacttgactcaaagtactgagtagcaggaccctaccaaattgccatctctgatttcaactccatttcctaaaactggaaatctagaatttttacaacataaaagtgatttaaaaccctgtttccaatagcaaaacttaactcagtgtttagcagacttaggcctttgctccaacaatactgccacctgttaatgttgttttaaaaatcagatctttgtaaccagaattctggtgtatgattttaatcctagcacccagagggtagacaggcagatctctgtgagctgtagactagaccagggatgggaattacaaatggtttgtgagccgccatgtgtatactgggactttaacccaggtccttgagaggagttgccagtgctactgagcactgtctctccagacccctcatagttggcaggcacttagaattccaggacttagaaggcaaaggcaggagatctctaagtttgaggacagaaagttccaggaaagccagggctagagagagagagagagagagagagagagagagagagagggagagagagagagagagagagaacttgcagcccctcccccaaaaaggtcagagtaatgatactggcaatataacctgattaaactgaaagtatctttcactatacagcattcttagtaaaatggtttccttatgaactgccaaaagagactcgggatccttatatttcctcataaaacaacttatcaaaaacccagacgaaaacacatgactacaactaattaatttttacttccttctcgggacctaagaagccaggtctgcagtcatgtctacaatcgcagagacagcgcaacagcatctgggtgggcgtctcctgcagtcagagcatgctcctgctccttcagcaagccagtgtgatcagcactcaatgtgtgaccagtgtggtactaggagtcattatgtcctgacacgtgaagcctatgccaaccgtagagagcgtaacaagcctgcaacacatgttttattctaaaccccttttaattatcatcacaatcaaatttttaaaagctaagagcgaaattaaaaatcatttcaattctactcgtgccacccttcagaacctatccacagctgatctacggggctccattccctaattcccctttctacatgctgatcacatttcaggatatggaaattaaagaagggctggcttgtaggtgaccttgcaagaccactgtgtgtagatgtttttactcccaacggtcttaaaactggccaaacagacgatcccacaaaaatgaatccaatacccgacagcgtccatcttcagaggctgtggacttgcaatgtttggtacacaagcctactaagggtttagcttctcattattaatggtaagtgatacatttaagcttagaaacatatgtccaacatgtgtgtacatgaaaagctttaaaagttgtttgaaaatgtgaaaatgactaaggctcctgttacccttgatcactgtcagctgtcacacactcctgtctgatacatattaatccacaaagcaaagatctaaagggggcaattctgaatccaccagctgcatgcactgatcacacacagcaaatctacccaaggtcagaagtgtagcttttcaatattaacttccaaatagcactgtaccttagcttttccttttgagacaaggtctgtgtgccattgactggcctggagcttgctatgtagaccagctaacctcacagaaatctatttgtctttacctcctgaatgctgggattaacagagttttcaaactcacccagcctaacattcttttggaactagatttagaaacaaagaattataaggaagtaattaaaagtttggccccaaagggtacaaccatttataatggctgtacattatttcatcctttaaactcttagcctgatagttacactaattacatttaattttcaaaactaggtaatagagaggtagattatcttgtactcaaaggcttgttttgtatgattattcatttgggatgttggggtgtgagtgtgaatgtgtgtgttgaacttagagccctatcctaccatctgatctgcaacctcttgtccttgatccattgtgtgtgtccactctgaataaaactcagtcatgagcaaaaactaaaactgtaaccagttctacagaaaaatggtgactgtattaaacaaagatgacttcgaggccagagagattgaaagcagcacgtagttgaaagcacgtgttgctcttgccaaggacctgggtttgtttcccagctacttgtaatccgttccaggggacccaacagacacacatgcaggcaaaccattaataaccataaaataaatcagactttaagaagatgagatttacccaggcgtggtggtatacacctttaatcctagcactcgggatttctgagtttgaggccagcctggtctacaaagtgagttccaggacagccagggctatacagagaaaccctgtctcaaaaaaccagaaaaaaaaaaaaaaagttaaaaaccttttgagtaagaataatctggactcatagagaaagaccacgtgtcatagagatagaccacatgtcaaaaaaaacaaaaacaacaacacatttattacaaattgcaaaaatatcatacttaaaggaaactaccttaacctctggtctgacttgaggaatgaaacatgactacaaaatttcttctgaaagcattctgtacagcacgtggcctaagctcagccagccagcgaagtgcacacttggaatcccagcccttgggaagctcaggcagaaggactgcaccaagcgcaagagtccactaagagctacagagcaagtgccagacaaggtatcacagccaaaactgcacctcaaaaaaactgaagtaagctgctatttattattatattatttagtttattttgggggtaaggcaagggtctggtgcacatgccaatagcacatgccgtggtacaatatactacacacggttaaggcagagtctcctgttctgcttctacatctgcctgcccctgggccttaaggaggactctctctgtctccactcccatgtcaccttaggagtgctggataacagtgcacctagctttttatgagtagtatggcaatggaactggggtggtaaggcctttacccactgagcaatctttgtgggcccaaaaactacttttattgtaaacactatactcaaaatacaatactcctgctttagtaagttcactccacgttccaaatctatacctcactgtcagccgtctgtttctcatgaaacataacctcttagaccggaaggtgctggagctgatggctcctacctgcaacactaacacacaggagaattgccaagagctccatgccagcctgggctacagagtgagttataggccatcctatactacaatgtgagaccgtgtctcgaaataatgataatagcaaaataaattaaaagcaaggaagttggaaggggacatattggggacgctaaggggagttaggagagttattgagaatgtatacgatcaaaaaacactgcatacatgtatgacattctaaaaataaatttaaaatattgtttttaagaaggctttttaaaaagcattcacatcattccaagtaaaaaaatagctgtgtctttcccatttgtaatgaaaccacttaactggccctaaattacagtgcaagttttttgttgttgttgtttgttttttgggttttttgtttgtttgtttgttttttgagtcagggtttctctgtatagccctggctgtcctggaactcactttgtagaccaggctggcctcgaactcagaaatccacctgcctctacctccggagtgctgggatcaaaggcgtgcgccaccaccgcccggctacagtgcaagttttaaactatagtcataagtctgagtgtaacaactggttttaaaggttttgaaaaactagagtgagctaagtggatggcacacacctgtaatcccagcacgtgaggtgggacaagcagaaattcaagatcagcccagctatgtaactaggttgaaggtcaatttatgagaccttgtgtcgggggacaaaacaaaacaaaacaaaaaaaacctggtgaggctgaaagctcagcagtaggatgcttgcccagcaaaggcttgatcctcagaactgcagggctgagcacaagatgtgctgctatatcacagcaacaggactttagaccaaacccaggtctgcatagaagtcctcatgaagccaatccggaaaaaaaagtaaccatgcaggatgtaaaccatcattaaatataacaggcaagtgtgtcagacctattttcaccatcatcatcattattttaaagcttgccgagagcacatatgctctagaggacttggggagagggtgttcagtcccaggaggcacccatgacagacagctcctaactgtaaataactctagttctaggagatccaacctctaaaggcagtgcatgcaaatggtgcacagacatgcatgcaggcaaaacacccagaacacattaaataaatgtctaaagttaaacaaatgtccaagaatacatacaatatgtagtaatttgaaaaaaaaccaaaaaacaaaaacaggaaagtgaaaggacagaggtgttgtattcagggacaggcacacgggaacaaataaagttcaagtacagggttcaaaagaatacctcaaacatacatcacagcacacaacatacaatgcattgcttaatttggtgcttttaattttaaagtgcaaggtatgagtagctcatctgccatctgggtagcggtgcagaaatctgcctgcctctgcctccggagtgaggtgcagatacatacatgccatttattactccacttaaccctcagacagtgggctagaaggaagagctcaactggaacagagagaaaacacaattcactccaacccatcaaaacaccaagggaaaacatggagcagactggactggatgcctaagctatgatatccagtacttgattgttcctcacagacttgccctcccgtcctcccgatcagcaagccacctaagaactgccattagaccggctggattttatctctcctagttttcttcttagaagaaagaatactgaggagaggaggaaaccacaaatatgaccaaactacactgcattaaatttttgttgttcacttggagagactgatatccccaggaataaccctaaccacacctactgagacttcatcccaccttccttgcagtggtggccaatgcctttgaactcagcagaggcatgcaaattgtgagttcgagagcaaggctgggctacaagtgtgagttccaggacagccagaacttcccagagagaacccaatttacaaacaaacaaacaatttcactatgatctagtgggcaagggacagaaaacagaagtatgtgcttagcaggtcttcaatggcaaagactagatttgtttaagtttgagatgaggagtgttggtttggcttttgcatataaggtctgtgacccccacctgtcctgaaactcattaggaagaccttgctggccctgaagaccctggcctctaaaatgctggtgttacaatctgggctaaatcacaaaagaaggactatgtatgtatgtatcctcacttatccccacaaacatctcctttagaagtactattagcattcagcactgaggtgtgcacctgtaatgacagtgctccagggtggaaggagtccatcattgggatcaggccctattatcttctccagcctgggtcacctagtaagactctcctatctgttaatctcaagagcaatcttgtgtttttatgagtggggagaagcaattagaagaatacttacatgaagaaccaaatctatcaaccaaaaaaacacacagatagaaagaacctgagatctgcaaagtataccaactgatcattatgaaaacttacagaaagaccacatcccttattagcttctatacaacaaaagaggttgtcggtgctttctggctttatgctgagagttactatatctaagcaggcaactggccagattagttgatccttacaccccaaacaaaataagcttaaaaaccagttgaatagtttggctttaaggcagcaaactttataaacttcccatcagtggggcttatattttagtaaggtagcgtataatcaaagcaagttttcaaattaaaatgaaggacaggcataaatgcagacttacaacctagcagtcggtagctagtggtagttttgcacacattgattcactacaaccagaacgtctaaccatatttactttgcatggagaaagataacatgatgtattaagaggtccaaaaaggacatcttggaggcatctcctcccactacgtgggcctcgggaataaactcaggaagcaggtgtcatgactagctgagctaccttacaaacccatcaggagaacttttagaactacaatttttaagttaaatgttatatttaaaaagtgactattctacccacactgtatttccgtatacactatattgtgagggtttatcttgactgacagcttgattggactgagccaccaatgcctggggtggcacagcacacctcttgggtgcatctgcagactcttccagagctggcaatgagctgcaaataacagggtaaagacctatcctggctgtaggtggcgccatccaaaagcccagaggaccaggcagactggaaacactgagttctttaatgtaaataaacaatacaaaaagaaaccagaatagacaggttcctgagtctgatgaaacccttgaagtgttcccagcaggtggcaagaaaactgagcagtaccccagccgcagtctcttgttgtgtggcttgcttggggattttggggggggttcttggggttgggggggcaacaaacaggaaaacaaacacaacaaaatcatgtagcaaaattccaaatgggtagcaacagcagataacagaagaagtgaggggacaggctcttgacctacagaagactaaaattagaaagagaaagtggaacaaaagtaaaagacagggaaacagcaaagcaaataaaacatgcttggtaaatgtacccgaggtgggattcaaagacccagatgtcaggactagttaagcaagaacttgcaggaaaataaatacaaacttcactagctgggtaaagcacaactgctttctgggcagtcagacagcttttctaaccgcattttactcttctgatgtactattaaaggttaagaacagtggtagataaaatgttatttgtctgcacaagcaatcagagaaaaacagcaaacatggcgttggggctgattccaatttgtttttttgacagggttcaccttgtagccctggctggactgcctctttggggactaaagcatgcatgccaggcagattccaatattaaccaaaacctttcaaatattcacagaaaggtaggcagggctgccttccctcctgccccactttgattgtgtttgtctgtgtactacagacaggacccctatgtgttccctcagccaggctcacttgcccaaccaccaccctaagatgcacactgagcagagaaagcagagcctctgggcagactaagtgagaaggaaaatcacttcgaccagtgaggggagcacaggaattacctgacagcctggtcaggaagggcaggaagagcttcgttttaccgatctcggagtccactgttcagcaaatcttttgatcctaaggataaaagaagggaacagttattgtctctttaaattaagcatttgtatcagtcctacctagattatcccatctctcccttgatgtgtgagaaggccaccgtgcacagagtctcctctaggaatcaactagatgcttgctttgccatagcaatacttataatttttgttaaaaagttaagcacggggctggcgagatggctcagtggttaagagcgccgactgctcttctgaaggtcccgagttcaaatcccagcaaccacatggtggctcacaaccatccataacgaaatctgatgccctcttctggagtgtctgaagacagctacagtgtacttacatataataaataaatctttaaaaaaaaaaaaaaaaaaaaaaaagttaagcacaagccgggcatagtggtgcacgcctttaataccagcacttgggaggcagaggcaggcagacttctgagttcaaggccagcctggtctacaaagtgagttccaggacagccaggactacacagagaaatcctgtctcaaaaaaccacacacacacaaaaagaagaaggaggtgagcacagcattcacaattaagaagacagtggggtttatactgtgcacgatcactcagtgatggacaagagaaagatcaacctgacctcaaattactatggtcatttaattccttacaaatttaagtttagttctagacaaacccaacctgaaagatagagaaaacaacagccttagctttccaaaacaacctttgaaaagacagttttctgaaacgaccttgtacaagaaaatttcaattaaataacttgctgcaactttatatgcctcagtacaggggaacactagggccaagaagtgggggtgggtgggaaaaggaggggagggggggtatgggggacttttgggatggcattggaaatgtaaatgaagaaaatacctaataaaaggaagggagggaggaaggaaggaaagaaggaagaaacaaacaaacaaacaaacttgctgcatgtctgctgcatgctggtactgtgttggcacacggcaatagatagaattcatggaccagacatggcagtgcacacctttactccccacatcgtggcagaggaaggcggatctctttcagttcaaggccagcctggtctacagggtaaatttcaggccagatagggagaaagggagagggagggggcagaggggaggtgaaagatgggggagaaaaagggagaaggagagtgtcagggaaggggggaaagaaggggaaaggagggaaaagaaagagggagggaaaagacaggggggaggggaaggaaagagggaggggaaggaaagggggaagaggaaggaaaaggagaaaaatcacaggagggtggggcaggtggcttagtggttaagagcatatagaaagcatatatcaaatatctaatattcatatattatatcagcatattaagaaatctgagcttggggccaggcagtggtggcccacgcctttaatctcagcacttgggaggcagaggtaggtggatttctgatttcggggccagcctgatctacaaagtgagttccaggacagccagggctacacagagaaaccctgtctcaaaaaaacaggaaagaaagaaagaaagaaagaaagaaagaaatcaatcaatcaatcaatctgagcttgtttcccaatacccacatcaggccactcacagtcacctgtgactcctatcttacatctctggcctcaggtagcactgcagctcacattcagatacacacacacacacacataattcaaaataataaaaacaagtactataaaagtcatggtaccactattactcgtgggtaatcagaagcaggtacaagcaggcactacaactttctaaaacaacaatgccacagaagtgagcatctaatgagcgccgtgctgtggacaggaggagcaacaggggaaggggtaccaacaccacacaatgggcaaccctgaagactactaagatgtgacattaagggctcttggggtctcccagagactgagccaccaactagggagaatgcatgggctggacctaggaccccagcacatatatgtggcagatgtgtagcttggtcttcatacaggtcccccaacaactgcagtgggggctgtcgcccaacagtggatcccgttcctctaaccgggctgccttgtctggcctcaatgggagatgtgcctagtcctgcagtgacctgatgtgccaaggtgggttgataacaagggatgggggggggggggggggcttctcccttatcagagaaggggaagcaggggaatgggagaactatgtgaggaaggactgggaggaggtagggggctgcaatcgagatgtaagatagatagataggtagatagatacatagatagatacatagatagatacatagatagatagatagatagatagatagatagatagatagatagatagatagggagaaatgtgaaattaagacaaattcacagctgcttatctctgccaaaaataactagtggaatcagacaatttctgcacatattacctagatttacaatcaaaatgcccgttaacgcctcacactgaaaagcaagaggcaagcatctgcaatccaaaaactgccaaggccaaggcttagtccaaagccagcctgggctatataggtaagcctgggctatataggtaagcctgggctatataggtaagcctgggctatataggtaagtcctctcccaaaaataaattgtgacttgaagacatagagggcttgccaacatgtacaaaaaactgggttcgatcttaggaccaccccacccccgaaaaaggcaaatgggattaacagacagtttagagaatgtttttattcattcgtatgtgagtgtgcctgttcgtgtgcgccccatcacagaaatggtgaagtcagaaaagaacctccagatacttattctctcagccaccatggggccccagcccagccttggcagcaaactcctttacccactaatccaactccaataatacgtatataatgttgggcatctaaaagacaggatacataaacgaaatgaatgaaggtaactaaaagtgaaagtttttagctcagcacagccggatgtgatgccatgcattttctcaaacacacactacatgtagcctcagagggggaccaaaaaaagggggggggtaaataaaacttttaaaaaatgctgggtgtgttggcacatgcctttaattccaacatcaggccagccagtttacacagtgggacattacctcaggagaactgagttgcggggcacagcgttctgcatctgagcagctaaggaaagagcacagaagcctagtggcagtagtctatgaactggcctcacctctttgctgagcttaagttagtaaggacctagttacagaaaggaagctggcttgtcagcaagctgcttgcagctgcttgctctacagctcctccctccctccttctctccctctctccctctgtctcacccactctctccctctctgaaaagctaagtcctgcaggatcacacaaaataaatacaggcaaagggggtgggagtgggggtggaggtgagcaggctccaccagtagaaggctttccacaggaactgctacagggtcaaaagtttacagtggtttcaatttcaccttttagcagccaatcagcaaatgagactgtgctgaccctcgggctgcaggagcgttaactccctggctaccagaactgctgctgccgttcctcctggcttctcttaagaagaaaaggggtgtttgtttgtttgtttgtttgtttttaaagggggcagcggacaccctaagttcaggtgactgatttgtgcagaaaaatgatttgataattatcccctttctccttcaattcaaggtttctttatcttagagcatccaacaaaccaactgataatgatataaagacaaagaaataattggggtatgttaggaaaatattttcttccatgacgcttgaattctaccaacaacctaaagaactgataggagatgatacccgtttagttccctgtgaatgctttgaaaagagactcgataatgaaggctgtcaattaaagtgtttaggctctgactccctcaggtcactgatacaactcttttcacaagaggcggctacagaaatacagctagagcttctcaggggccatgtgtgtcctcatgttctcgccaaccccccaggacccagtgcagcctccgcctggaacaaactggaaagcaaagcctttcagcagagctggcctcctgattgctctttcatataaacgtcctacaaatgcaaaaactcaatacgctgatccatcaccactgctctcagagttctgtgctgacagtgggcagggccaagatggagaggacagggcaggcacaacaacatcccaccccggcccccatttccccttctctctcctcctccccagggcaataaggaagcaggacattgacgcccgagagcttgaagccagcatggtaatttggggttgtttcggttttggtctttggggttttggtttttttttttcttttttttttttttttttgcgtgtttttttttaaagggatggttatgggagggaatttaagacaatctctctctaaagtcccaaatggtggaaaaagcagcaatcctcctgccccagcctcaaagtcctaggcttacaagtgtgagacaccattccttgaagcccacaagacaaggaggaaacagctgtacaaactctcctatggaaatgacctagtaaatcctaatttatagattaggtaacatataccaactggttgaatattagcagttttacaagtttagatttgagacccatataggcaccgccatcggctactaaaacgatcccgtataggatagtaggttctgtccaaagtgagatcatcaaataccagctatttctgaaatgcaattggtaaccaataaattataatgcatcacttactatacagcaaccagaggcccagagtacagcatagtgtcttcattacacagaaactctatagtgcatcttgatatacatgtttcagaccatgaataaaatcaatattataatttcaagttgaaaaaaagatagaattaattttctaataataacttccaaacccccatgatataattttatggctataattctaattttaaaatacatctagtttgttctttttgccatggcttacagaagcgtgtgcatgcacgtttaatttgaagaatcttctctttttacaggatggcctcattgcacaggaaaatggatgcgacaaaattctatatcaagtcagcatgttagcaagaatcttttctatgtgttctgaatttgattaattcgagccaaggtcacttcctgaacaatgcctgccactgcagctgcaggcaaaggctggcatgaggctgggaggagaaagagggtggggatgtttatttactaagaagcaaatgggttccatttccacacagttatcttggcaagaaaaagactggcaagctcctgggatcctggtacataaagatgaaaaatatctctattttttacatagaaatgtaattcaatgagcataatgttcatgtcaacgttatatctaaaaggtcctcccagataatgtgcaaaaaccattaaccacttaaaatgatacaaataatgccagacagcaaggtaaaccgaactggcaagtacacagtgaccctaacttgtacaaaaggaagataaggtcttacagaccacagactcatggttcccttgaccaacaccaggaaaggcctaactcaagagtaaaaaatccaaaacttattattttctaaataaaataattcataaaaatttatcctgacatgcaattgaatttttacctcagcattatgcaaatgttatgtcttttttaaaaaatctcaaagtagggggctggtgagatggctcagtgggtaagagcacccgactgctcttctgaaggtccagagttcaaatcccagcaaccacatggtggctcacaaccatccgtaacgaaatctgactccctcttctggagtgtctgaagacagtgacagtgtgcttacatataataaataaataaataaataaataaataaataaataaataaataaataaaatctttaaaaaaaaaaaaatctcaaagtatacacatcaatggcaagtaaagctatcagtgtctgctagcacagcaaggaaacctaaaatataccacacaccccgtctgtacggctttgcaccctacaccagtgagctggtaacaaacataccggcagagtcaggaaacctgcatcttctgtaattttctataatggccatctataaaagcactgtgtgatatttttcaaatatcaatcaaactatgatgttccagatacgtatcatcatcagagaacccatgtgcctttcttggttacttgtttaatgtactgtgttattttttaaatttttatacaatattttttgatattttccccctttcccaactccttacagattctacatatagatatgagatttcacctcactgtcttctggctaccttaaaatggaaatccccctgcctcaggttcctaggttctagagtctggtatgcaccactaggcccagcttaaatgtgtctttcatgctgtgggtgaagcccgggccttgaccactgctctacctctgagcagcattctcggctcacctgtttttgttctcttgtacctcttgttttatgtagaacaagctctcactataaagtccaggctgtcctgaactcacccacttagccatgactggcctggatctcatgatactcctgccttggcctccgaagtacataccaccacacccaagttgtgtttataatggttgggtaacacaaaactcactattacaaaaaactgagggaggaagtctgggaagatggcttgaaggtcagagcacttactactcttccagaggtcctgagtttagagcacaaacatggtagcccacaaccttgttaactccagttccagggaattggacaccctcttctgacctctgaaggtactgggcatacacatggtaaaaagacaaacatgcaggtagaaaacccaaacacaacttaaaattttaatacataaaaatttgaattaaagtaatgacaaaagcagttcacactgtcttcaaataagcccagcactttcaaaacaggagggagcttcagccaaggtcaaaggcagcctggctacctaacaagagccacctaagacaaaacaaaacatcttgtcaatgtatagaagggtattattcccattctctacatacgctgagaatacagctctatctttctggcttctcccatgctttttctgacaacttagatgtgtaatcaacaaaaggactttctatatcatgttaggaaaaggaagttaactgtgttcacacagggatgaggccttggactcagagagctattcatggttgtggtaagaaagtggcttgctccgggcgtggtggcgcacgcctttaatcccagcactccggaggcagaggcagaggcagaggcagaggcaggtggatttctgagttcaaggccagcctggtctacaaagtgagttccaggacagtgagggctatacagacaaaccctgtctcgaaaaacaacaacaaaaaaaaaaacctcactatgtagaccaggctgacccagtggtaggattaaagatatgtgccagcacacttggcattgtctttattcagcctgagtttaatatttctagcccttcctatttcaggtagcagttataacgagtgggtggcaggtctcaccattcctttaggtccaggacactctgtttcagggtacatgtgagggggaaagatgcagtccatgaattcagaatatatatgcagtaaggggctgaagcaatgactcattaaagtaacctggagttcaaagccccagcacccatgtaaaaaggcaagcacacgcctataatcccagagcactggaaagatggagaaggttcctgggttggctacacagctagtctagctgaatctacaaactctagttcaatgagagtacctgctacaaaaaaaaaataaataaataaagataaaaagcaattaaaggcacccaatgtcaacctctagcatatataccctcaaacggagctgaggcaggaaaattactgttggttccagacaaatgatggcactcatttccaggccagcctgaccgcagtgtaaaatgccttcaaaaaccaaaaaatgagccaggcactgtagcacatgcctttagtcccagcactcaggaagcaaaggcaggcagatctctaagttagagaacaacctagtctaaagattgagttccaggacagccagaactacacagagttaggaaagagggaggacgagggaggagggaggagggaagagggaagagggaagagggaagagggaagagggaagagggaagagggaagagggaagagggaagagggaagagggaagagggaagagggaagagggaagagggaagagggaagagggaagagggaagagggaagagggaagagggaagggaagggaaagaaaaactgcagatggcatttgtcttactgcttttcctattgctgtgataaatatctgacaagatcaatttaaggaagggcggggcgttccaacttccagctcaagtggaagcacagagacagaagacgggtgtttgccctcagttctttctcctttctacatagtctaggattccgggtgcatgcatgattaccgtgggtaggtcattccatatcaacctaatcaaggaaatatccacaggcatgcctagattccctgtctcctgaatgacaaccaagagtaaccatcaaaaggctacagcagagtagcaccctagaaatgtcaggcacagcagcacacttgataacccacagctctggggaggctgagacaggggagccctgggaaatgctggccagctgatctagccaaatgcgtaacccagtctcagaaaataaggtaaaaaaggcattctagaagatatgcaagtcttcatacacatacacaaccacctaacatgtgtgtgtgtcaaacacacaagtacacacacacacacacacacacacacacatatatatatatactcccaaaaagtatctgaaaaatgattacaagaaaaaaaatcaacaaaaagaaaatgaaaacctaaattttcaaatatgaaaaaaaaaagaggctgggaaagagcataatcagtaaagtgcttgccttgcaagtacaaggatccattttgatacttggtgcccaggttaaataaccaacaacacaacaaccaaaaacagcactgtgagcttagtggcactcttgtaatcccaacactagaaggcagagacaagatgatctctgaaggctcactggtcagccagtctagctgaactgttacaagtcccaggacaacaagagacctgtgtcaaaggaaacaaagaatttctatgcatgacacagaaattatgtttctgtgagtgagcacttgagcatgaagacacacaagtatggagggcaggcaacatgaaccagcagataaaggtgcttgctgtcaaggcagatcccctagagccacacaggaggacctaagctgtcttcagactgccatacacaaacatgtaagaaaaaatactaaatgcaaatgccttagtaactgcaaattcctataataaaatactaatgtacacggaatagatctactgaagatacaagacaataccaaatgcggaggaaaatgcaaaccagtggggctttactggactgatagggacataaactgggaagaaaaagagtgtatttaaaacttaaaactttccatcatatggcaataacaatgtttacaaaactataaaaccatagttgtaactcattaacttattaggaaagactctcatgtcagctctagtagctgatgaagcattctgacgaagccattctcagatatgctaaaatcccatctgtcttccgtggcatagctcaacaagggtattctaagcagattttaaatcagtctggctatgcagctaattagagccaatatcgactcatatttttttaaaaagtcaattctctaagtcctgtcataacattttaaacaagtaagaacagtcgatagaagttactaagttgggggcaggagagggggctcattcagcactggctgctcttccagaggacccaggcttgatttccagcacccacatggcagctcacaactgtctgtacagttccaggggatcttatgccctctcctgatctcagtgtgttctaccacatatgctgcagacatacatacaggtaaaatatctatacacataaaataaaatgcaaagaaaggaagctagctactgtaagaaactctgatcaccatctgctttcctcacaggtagccttgtcccggagcagcagcagtccggagctcaggatgtaggagctggccttatgctcctgcctcagcttctggagtgctgtgattaaagccagtgcttccctgagccactgttcacttagtccccttgtattcatcacttccttcctggtggctgtctctgaacccttcccactggctcagctacagggttcacacagtacgcacagaggacagaatccagagcttgagttaccttcccaacactgccccccaacaaaaattgagttacaggtatgtgggatggctcagtaagtaaaggcacttgtcaccaaccctggcaactgagttaaatctaggtccctccattatggaaacagaaccaactgtaaaagttatcctctgacctccacatataccctatggacatatacataataaaggatgaataaaaaatttaattttgccgggcggtggtggtgcacgcctttgatcccagcactcaggaggcagaggcaggtggatttctgagttcaaggccagcctggtccacaaagtgagttccaggactgccagggctatacagagaaaccctgtctcgaaaaaaaaattaattttatattttttcttaaaagttaggaagaaaggaagttagttcactggttagttaggaggaaggagtgagttagttaagggctggagggatggctcagcagtttagagcactggcactctttggaggactaagattcctagcagcacaggtgcctcaaccatctgtaactctagtgccagagacctaacatcctctactggattctgagggcactcaatgcacatgatgcacatatagacatgcaaaacacaaatagaaacctttgggaaagatgctgagaataatcacacaatgatctaatgcagttttttaaaatgcaatgcatggatataggtaagaaagccaggcatgggaacatggctgtaataactgttctctgtgaagttaagccatgactgtcctgagtttggggctggcctgagctacataatgagttcaaggccaccctgattgatagacacacatacacaaatgcgctgtggaatgtataactgtattttttaaatttttttattgttttatggcagggtttcatctatactagacttgcctcaaagtaagcttactattacacaaagattgcctgcctccactttctgagtgtgcaccactaaaattgactttagcaaagataatccaattttactatacaaaccagtgactctgcaaagtcacagtgggcatggggaccagcattcttcatagggaaatgaagtgcagttacttgagcaggttcccaaaccaagaaggatcagggtatgtccaatagcctctcttgtagatcatatcacgccataccacaattgttttggtttggtttaatttcattcattcattcactcattcattcatttattcatgtatttagaaggcatgcatatggaggccaggacaaacccataagagtcatgtaggtcatggggatcaaactcaggtagtcatgcttggcagcaagctccttgacccactgagccctctcactgccctaacagctgacatggatttaaatcatctctgcttttccattagcaaaataatcgtctaagagcacactgcttcagaaataggagaaaggagacaattactagctggtgagtattacatggaatatttacagatctcacgagagagagctcagtgtaaaatatctgactagatactgtacaggagtcagctccctgtgagaaggaatctgtctaatgccgaaagcacagctaccagttagagtgtaattagcttaaaaaaaaaccgaagtcagtcaggtgtgtgagcggcatttactatttgttccctttgtacaggaagcactcagctctgatctcaaagtcaccttcaagcactaacggaagcacaaggctgattcctccttgcccagaacaaaacccacagcaaagaccaacgtaaggggacatttctctccacgttttccttccccaagaaacagctttataaaccatatgacgttcataatgaaaagattacaatttagaaaccgaggagaagaaaaattaacaggagcatgagacaaaaagagcacatgccctgatacagaagcctctgaaattgcttttggaaaaacatgggacaatcatctaattatcagatgaaacaaactacaacttagagctcaatttaccagaggaataaatactaaggcactctgtattacacttgtaaatgaataaataccaagggaggtatggcagacgttctaaatgcaatcaagttaagttgttgtttttaaatcgggcattataatctatagctttatagatttgccactaacctcctaatctggcaggttaaatttcaacattcaaagtactggttaggttttctagaaatggtccagtaagttgacataataattaacgctgtttgatctacaaaatctgagtactcagtgctgagagtgatgagtgaccttgaggcagctcttggaaggcagtcaccatggcaacgcttccacaaaagtgcctcatcctcagcaaaaggcccaacccagagcataaggatctttaaagcagaaaacctccgccctcacccacagcctagcaaggggtcacagtttcttttaaaaagtctctacatcaaccttcctgattattctttcagagaaaatacaaattagcttcacagccatttatctggtctggcaacaaaacaaaacaaacaaaacaaaaactatcttttatttgctaaatgggaagaattcattttgttttggaaaaatatgtttcaatacaattagtaccattttactgtttttcgttcaggaatggtaacacagtggtaatctcagggctgagaagtctgaggcaggacaacaggcagtaggatgctagccctgggatatatgctgcattaaaggagagaaagaagggccacacaggggcaggacactggagtgggaagacattatcttccagcatgcacttaaagaaggaagcacaaaggaagcagatttcagcccagacacagagtgcactcatgactgtctacatacaccacggcttgctacacttagtgttctgatgacgctgtgttcccagctccctccagcagtgcttcctgaaagccgggaggagtcattttattatcacaacagtcagcagaacctcagcaccagatactgaacaatttcacaattttctcacagagctaccaaagcattcctgaaaagctgtgtccagaacagctaatgtttttcagcctaaatacaaagatcttatcgacttttccatttttactgtatataatctatttgttcattctttcctaccccaccccatttaccattagtttgcaaagccatgagtactgactgatgagatgactgtgtggggaaaggaatttcccccccaaaactgctagggcagacatgaaagaaggtgcacacaacgtgcaagctggtatacatggagggctgcaggccaactggagcctcataatgagaaactatgcagggttttgttgtcattttttgagacaggacctttctatgtagccctggctgcctggaactgcctatgtagaccatagtggcctcaagttcacagtcatctgcatagcctctgcctcaaagtgctaggactaaaagtatgtgctaccacacctagcaaaaagaatttttacactaagaaaaaaaaagatagcaatgtgagcagggcagtaggcaaatggatttctgagttccaggccagcctggtctacagagtgagttccaggacagccagggctgcagagaaaccctgtctcgaaaaaccaaaaaaaaaaaaaaaaaaagatagcaatgctatattaccaaaataagttacaaaattaagttctacccataacatgatatactgtatagtgtcaaaaaggttcacagcacattataaaacaatataatctcaattctctctataggttctacttatacatggcacttacttggacagtctgaagccaagcactgaggctgcagtcccacactggaaggttcagttaagagaactgagactctgacacaagcctaggctctatagtgagaacttgcatgtgaaagactaaaatcacagtcattttttcctttacatctttgaaggttttgtacatgtcacgcaatttcaaaaaattaactccttttttttttttttttgagctagttatggagatcagcaggacctgaaattcaaagagagctgactgtttctgcctcatgagtactccaccatcctggctagaggtattttgtttgtttttaaagtcaattcccaacgggcctataatctcacacgcttttttaatcccagcacttgggagccagaggcaggcggatttctaaattcgaggacagcctgatctacaaagtgagttccaggacagtcagggttatacaaagaaaccctgtctcaaaaaacaaacaaacaaaaaatttctgtggggcgagaaggatcgcttagagcagcagttctcaacctgtgagtctccacccctttggagtcacatcagatatttaccttacaatcacagcagtagcaaaattagttacgtatatgttagtcagggttctctagagtcacagaacgtatgggtagtctctatatagtaatggaatttgttgatgacttatagtccaactccccaacaatggtcagcagccactgagaatggaagtctaaggatctagcaattactcagtcccacaaggcaagattccttcttccaaagtccttatgaaggtctccagcagaaggtaaagcccagattaaaggtgtgtgctaccactcctttaatcccagatgaccttgaacttggagatcttcctgtcttaatcttctggaattcatggccactatgcctcagtaactccatgccaagatccaggtcagacacttgtatctcccagcctctagatttggatcacaggtgagcctccaattctagattgtagcaatgaaataatttgatggctggggatcatcaaacaagaggaactgtattagggttacagcattaggaagattgagaaccactggcttcgaggatgaaagcactggctgctgctcttccagaggacccaggtttaagccccagcatctatatactggcttacaactatctataatttcaacactttctctggcctgcctgggtaccaggtatatatgtggtgcacagacaaacataaaggcaaaacatacaaacatatataacaaattttcaaaaagtgaaaaatttcccaccccttgagactccacactgtgcttcaaataacatactgcacagaggcaagagctcgggcttaagtcacacaggctcattggcagcttctctattagtcatggctttgtacaataactcaacttcttctttctcaccaagcctctgttcttcctatccaagaaagagcatacacggaactccaatctccatcaacactaaaccaagggggataacaggcatctcaatctccttcgtgataggccatctttaacaaatacttcaagcaacaaatcaaataagctcttggctttttgtttgttttgtttttctagacagggtttctctgtatagccctggctgtcctggaactcactctgtagaccaggctggtctcaaactcagaaatccgcctgcctctgcctcctaaatgctgggattaaatgccaccactgcccggaataaagtgacagttctatacagccgtgagccatcaagtacttgctgggatcctttggatccacggtcggtgcccttaccagctgagccacccctccagcacttttttaatgaagggttccactatgtagctctggctcccctgaactcagatccaccggcctctgcctcccaggcactgaggttaaagctgtgaccaccaaacccatctgtaaacccttctgaatcattcattgtaattgaatgcctagcacccacacatgtcccaggagctctgacatcttccaccttcttgaacaccagccacacatgtggtacaccagcatatatgtaaggttaaaacactcatatacataaaaataaataatggacacaagaaatatttttaaagtaaaggtttcttagacaataatagatgccagacaggaaaggcaagaccgggtctcggcgcaagctcccacaccagcagcagtgcggctaggaggcacctggtaactggatctcgctctctcactctctccgcctacccctgcccctccccctcccccaccccacccccgcaaaattaattttagagaagaaaagcaatataaacatattatctatatagataagggggcaatccttaacaactacctcttctgcaccagcagccgctgagaccaggaatggcttttatataaaaggggggccggccctatggtagcatccaaatcaaggttccagaccagagctattatctccctaggttcattcccttatcttgccctttcacacttggccttttcagtaattaaatgcctggtgccctctcagaagaagagatgtctcggggcatctgagaggtttttctcttttggggacacactatcaggtgacccagactgaccttgagattcctatgaagaggaccctccctcctgtgacttcgggtacacataggaagcctactggcccagctcatggctgtatttctagaaacagttccagacctaagagatcatggttaaaatgaaaccagagacttccttaacattccctctcagagtatcttttatgattcaggggctggagaaatggttccaaggttactgtagaggatccaggttcaattcccagcaccacatgatggctcacaaccagcctttccaggggatatgacaccctcttctgacctctgagagcaccaggcatacacataagcgggcaaaaccattcctgccttctctgaggaatgctttatgcatgtatctgattaaaacttttcacttttaaatagttatttattgtacatgtgtctatgaatgtatgtaaatcatgaatatgcacaccttggttgacaagcacaaagataaatctctacagtttgtgtttcttcatctgaacaggggccacaggggaaaggagtggctcagataaagaaaatgaggctggcaagatgactcagagggtagatacttgctactaagcctgacttgagttccatccctgaagcccacatagtaagagaatcaactcttgcaggttctctctctctctttctcacacacacacacacacacacacacacaagcaaaacatgttacagaaatatatttaaatcctaacctagacaaaccaacttcaacctccttcctcatctagaagcaattattagcacaatttatttgaaaattaatcttgcatttgccttgctaaatttatctcattactccttgaaataattcttttctagttatctagctttcctgtttgtttctaatgtccccaaatagaccctaacctctcaaggaagggttatggtcatatactgttttatacaaagatgcaaagaactagatcatattagcccccttttaaaaagatttgtataaacatctgctgtgcacctgactgggtatatgtatgtacaccacatgtatttaggagccaatgaaggtcagaagaggcatcaaattccccagaagtaccatgagggcactgggaacagaaactgcaaaggcacatgtgtttttaactgctgagccatgtctctggccctatataagtcttcttaatttgtactgatgaagtaagtcagtgtcttgtgtgtgctcctgttcctatgccacctccagagctcagattactggtatttaaaccactgtgccaactatatgcttatttcctggaaaggaaactttagttatattagaaaatgcagcaaaaagtaatgaaaacaaaaacaaaaaccctaatgaaagaacagggacaaagagagaagggagcctggcacatacatttgatctcagtacttgggagttagaggcagggccagcctggtctacacagtgagttcttcgacagccaaggctgttacagagaaaacctgtctcccaaaaaaaaaaaaaaaaaggaaggaaggaaggaaggaaggaaggaaggaaaaaaacagaaacagaaacagaaacagaaacagaaacagaaaccaaacaaaacaggctacaaagatggttcagtggttaagactgctcttccagggggctgaagagatggctcagtagttaagagcacagactgctcttccagaggtcctgagttcaattcccagcaaccacatggtggcttgcaaccatccgtaatgagatctgacgccctcttctggtgtgtctgaagacagctacagtatattcacatatataaaatgaataaacaaaatctttaaaaaaaaaaaaaaaaaaaaaagactgctcttccagaggtcctgagttcaattcccagcaacagttggtggctcacagccacaatctgagggaatctgatgccctcttctggtgtgtctgaagatagctaccgtgtactcccataaaatacatctttaaaagaaagaaacaaagaaacaaagaagaaaatagagaagaaaagaaaaaaaaacaatggaaggggtgaggggaagaaaaggaagaaatccttagggctatgccacctactgatgtcaagcaagaagccaatgcaccatgtttctgtagtacctacagcaatgctgagtcatgacaaggaggactgcccactgtgctcctgaggttactactcatctgaagatgatggccacagggtcaggattttatatgcaggagagtctagaggaccagctcagcgtttaagagcattggctactcttgcagctttggctctcaacccatccataactgcagccaacaccttcttggaccttcgaagtaccaaagaaacgcatgctggcatttttataagattttatatgcagtgcttgggtactttcctattttgaaatcataatgtagtttattagtgactgtctttagaagtttaattggctagttattttcatttgctttctttcctaagtagaatagagaccttcaggttcagcgagatatatctcaagggaatatgaaagaataaggaacaatacaggaagacttcttgatccagtttcctcataggcatgcatgggcatgagtgcacacacttgtactcatacacacatacaataataagtagtagtagtagtagtagtagtggtggtggtggtggtggtggtggtggtggtggtagtagtagtagtagtagtagtagtagtaaagaaacagagtgaactacagggatgggccagtagtagtagtagtagtagtagtagtagtagtagtaaagaaacagagtgaactacaaggatgggccaaaggttaattaaaaccacaggctgcgcctttaatcccagcacttgggcagcagaggcaggtggatctctgaggccaagactcataccaaaaataagtaagtcttaaaatatattttaaactcacaattgaatcaaaccacagtctcaggagttgaaaaggggggctttgataaatcaaactgaaccagagctgaggatgtaatcaatggcaaatcctttcctgctgctgaaagcctagcttgcatgatggtggctccacctgcaatcccatctctcagcagatagaggcaaagaaatgggaggtttaaggttgggccttaagtcacttgtcccaaatttaaccacctgagttcagtcctcacaacccacctggtggaggaagagaacaagaaacctttaaaaaaaaattcaagataaccctcagttacacagaaaggtccaggacacaaaagacctccccaccccaacccccaccagtgtatggaagaaacccaaaaatccagttagaagcacagcaactgagggaggcaaaccgtgagagaaatcttgccaacagaaagggttagagaaagtgaacagccagagcgcgtgctcagggctcaatgtcggctccaggttctacaaaccaacctcaggagactcactttaaagaggaaaaacaatgttcttattaatgaaagaacaacctctcaggagacaacagaaattgtgcatcttaaagttacctggaaatctatctagcaatcgttcccccaaagccttagcactgcagtgacggagacagaagaccaagatcaagaagagttcaaggttggccgggcgtggtggcgcacgcctttaatcccagcacttgggaagcagaggcaggcggatttctgagttcgagtacagcctggtctacaaagtgagttccaggacagccagggctacacagagaaaccctgtctcgaaaaaccaaaaaaaaaaaaaaaaaaaagagttcaaggctggcctgactcaatccactgacagcatttaacagacacagaattcttttaatctccataatatcaaatacctaagaataatttgttttggttaagccatactaccattacatatgcatgaaagacaggtatttgagtatgtactgcactgtctataatgaataacaagttcttctctggacagactcaaccaaactccatcaaatgtaaagcaaagatgctttacatctgccacattaaacggaaatccaacattcattatttaaaaataagcctttgtgctatgcagacatccaggagctgatagcattttgttgagataaaaagcagttggcctggagggatggccagtgaggaaagtgttcgtccacaagcctggcaccctagaactttacaccaaacagactatcacaagttatctcctaacctacccacacacgcacacaccacaacgtgcacaccagctcacactatggcaggcaaacacacacacaagttaaaacttttttaaatttatgtgtatgtgagttcctgcattggtttattatgcactgtgtacatgcagggcccacagaggacagaagaaggtgcctgatcccttagacctgagttacaggcagtcgtgagctatctgatgtgtgtgatggaaaccaaacctgggtcctctgccagcataagtgcttgcttgcttgcttgcttatttgcttgtttgctttcttcctcctcctcctttttaaaacagggtctttccctgtagccctggatgtccggaaactatttatataaaccagcacagcctcaaaactcaagagaccagcctgcatgctaggattaatggtgtgcgacactttaccttactacaaaagtgcccataaccactgagaaacctctccagactccaggaaaaaaaatattaattgtacaggaagttattagtaatccttattttctttctttgtatttttctgttttccacaggaacaggaattaatcacttttattttaaaaaaaaaaaaaaaaaaaaaaaaacaagaaagaagtgctttggagccaggcgtggtggcgcacgcctttaatcccagcactcgggaggcagaggcaggcggatttctgagttcgaggtcagcctggtctacagagtgagttccaggacagccagggctatacagagaaaccctgtctcgaaaaaccaaaaaaaaaaaaagaagtgctttgggctggtgagatggttcagtgggtaagagcacccgactgctcttctgaaggtctggagttcaaatcccagcaaccatatggtggctcacaaccatctgtaacaagatctgactccctcttctggagtgtctgaagacagctacagtatacttacatataataaataaataaatctttaaaaaaaaaagaagtgctttaagggggaaataaaataaaaataaaatcaaaggcctttttataaaagaaaaacaaaaacatgatttttaaatctgcggttccccatttgttcaaaactgaaagcagaagtcttgctgggtaggtggagcaggccagatagcagaaggtgggaggtggagataagaggataataggtttgaggccagcctgaactatagaatggaaagagcatttcaaatgcaagtgttgaagacctaactcaggctggaatgcttgccccgggagcaaggcctgtggctggaagctgcaggactgacctggacacaaaactgcttccccttcccaatccttcctcctaggcttcctttcttaactttttgttcattttactttctcagtgaaattatcctaactaaaatataaactccagtgttaagaataaaatgtagtaccagaacacttaccgagtattcaggaagccctggaattgatcacaaacacacaaagagaaacaaaaacagacagacaaacagacagacctcgagttgaagggacagtggaaatggctgggatcagccagtttgaaggcaggcatttcggcaagcaaggcacggaaggtaaagatgcagttaacagtgagcagcagagggcaggggaggttgacagggaagccttcaggccagaagagaattagggtgaggagaaagggataaatggttgaaaatgtagaatatgtagagagggctggaaagggaagtcatgaagaggtcagaagacaacagaatctaagaaagagatgagactcaacagggagaacccaatgaccagggtagaagcctgctccagcatagttattccggtccagaaacagttacttgcgcattaatatggctttatctctaagctggaagcaactcaagagtgtgaagcacatctgttatcactcaaaccctcattcctcactggagaagcacgtgtgtccttacagtttactctgcagggcaaggatctggttcattgttgttttggaggtattttgtttgttttccactttgtattctgtattctcttgagactaggtctttactatgtaacactagctgtcctggaactgtaaacaaggctggcctcaaagcaatgttaatcctcctgcctcagcttccctggcacttgggaggcagtggctggtagatctctgagtttgaggcctggtctacagagtgaattccagggcagacaagttagaactacacaggaaaaccctgtctcataacacacacacacacacacacacacacacacaccccaaaaaaaaaaaaaaaaaaaaaaggagaagaaggggagaaagaaagaaaagagttgtctagttaaaatcagcaaggtggggtagctgaaccccccaagcttcaggccaacctgagcagtagagtgacaccatctctcaaaagtaaataattaagtttaattcataaagggtggctggccattcctcaatggcactctgccttgtaagagatgaagcaggacaggcttaggttacagtgtatcttgtgatctgctcttccatacttatcttggtcaacttacagaacctgggcaaatggggtgacctgctcacttgagtctaaagaatggctaacttcaggaggaagcctgctgatcttctactgcactaacagggacctgcataagctaatacattgaatagtttctaaattgtagcaaatgaaacctggatctatccgaacctttatgttttacttctctgagcattttacacaaaataaaattctataaatttatataaataaaactattaaaaaaaactgttgcagcagatgtattattgtaagtccactataatcaaaatcgtttggaatcgtgaaacgtataaataatttccaagatcagcctttccaacagtgtctccccaggcaaccctagagcaagcccagcccctaggacgggcagctccgcgctgctcgcaggagtggcagatgccatttctcgctgacaggagcttcaaattccagtcaggcaactgcagtcacagtcccactgaatcaggaatataagcgtgcctgcatgttattatgggaaatagtggaaaatttcacaggctgacatccagaacgtctgcggctccttttcatatttcttcctgcgaagcagttattagaccagtcaaatttttttaaagctggaaatttccactgttcttttttaagtatcctttttagatgtaaactaaaaactgttccaaaattcaagtatgtcaaaaataattcagataaaataactacttaagtgaagggaacagtaaaaaacctggggtctccatcacctttgggagagagacacatccattgagacccgcagaagcttaaaggtacagtaacttaatatgaaggctacaatgctacaaacactctgagatgctgattttctcatttgcatatgcctcaagcattcaaaagctaacataagtcagtagacagtgaagtagaacccatgagacaagaccagcattgtggcaggagcccttagtcagagctgctccggaggcccaagcaggcaacaacatcaagaccagcatggacagcaagatctcatcacaaaagggggtagtaagatgcacatctctttatagaaatacattcttcacatccatatagcccatatttttagggctagcatgtacctactctgtgccaagggtctgattcctagagctgagtgtttccagcatggagaggaaagcacagcagctgggaaacacagctcacttggcagagtgtggggcaagcatgacgccttgggtttggtccctagcatcacatcgaaaagccaggcatggtgattatgccagaactcaggaggaggaagaagtctccagatttaaggccagcccacaggacatgtgacatctctcaaaaaaaaaaaaaaaaaaaaaggtggggattctgttttatttgttttcttgattttaagggaatataaaaaatcataggcaagacactctttgcagtggcagaggcaggccctgagtttcgctcctggaacatacactgagagccagtgttttagacaggttttcagcaccttttcatgagatcacactagaacatatgtaatactatacattttaacttatattggggaggaaatagacaaagattatttttccccctttcaaacaatggctcatgcagtccaggctggtctcaaattctctcactaggtgcagaggatgaccttgaacctctgaccctcctgactcctccctctcagaaagctggaattaaagcctgtacctcccaaacccagttcctgcagtgctgagcatccatccccgggcttcccgctaggcaggcactctaactgggctacatcctgagccagacaaagacttgactcattttattaaagggataaaaagactacattccaaaccattcaaaaatcaaagctgacttttaacagtcaaatgcactaactaataaggtctgcttaagatgggctgggagatggctacataggacaacgcatctgtgacgagctatgagaacagagcttaaatccccagcagctactcagaagccaagtgtgcagctgagtgtgtgtaaccctgcacgcctaggggaagatgggagacaagacaggacaatccctggaagctacaaacaactagtcaggcctgtacagtgggaaagaacaaaggacctcgcttgaagcaaggtggcctttgacctccacatacatgcatatatgcacacacaggcacacagataaacctttaacctttacccaagacaggggacgatggtgcacacctttagcaggaggcagaggtaagtggatctcttgagtgtgaggccagcttaggctatatagactatatagcatgttctgggccaaacacagctgcaaaatgagaccgtttcaaaaaacaaacaaacaaataaacaaaaaactgtggacatgtggtatgcttgtaattagagcactcaggatgccaaggcagatggacatggcaagttcaaggctagcctatactacatactaagatctacactccctcccccaaaactagcaatatattatgcttgtataactttttagcttaaaattttaatgacttatttttatttcatgtattttgcttgcatgtgtgtctgagtgagggtgtcagatcccctagaattggagttagagacagctggggggtttcatgtgggtagtgagaattgaacctgggtcctctagaaaagcagccagccctgcttatataactttacagaccatccacacacagcccagaacttgaacgtatcatacatactcctgcccatcagttaaaagctactctaccactgactcaaaagctacatcaaaacacccagctactccttttgaaaccttgctttttgtttcacaggccatggaagagataaccttaaaagtgttcctatagattatactttcatacaggaatgatagaggtaccatgaatctaggttaaggtccttaattttgacagaacgtattttttcctgagacaaggtttctctgtgtagccatggctgtcccggaatttgctctgtagaccaggctagcctctgcctcctgactgctgggattaaaggcatacaccaccactgcccagctcagaacatttttttaaagttttttatttttttttcttttaaatatctgttctgtatgtatgagtgtttcactcatgtgtatgattatgtactatgtgtgtgccgatacctgcagagattagagcaatggatctcttaaaactggagttacagatgtgggtactggaatggaaatcaggctctctgcaacattaagtgccaggcatggtactgcacttggtagggagaggcaggtacatctgagttcgaggctagcctggtctacagagggagttccaaggcagccaagctacacagggacgccctgtctcaaaaaatataaataaataactattaagtcaaatcaggtacttgtaactgctgagccatccctcagccccttaagttttatatgtatttgtgtatctgtgttatgaacagtcatgcatttgtctgaataggccaaaagagaatgctgacccctagagccggatggagtcgaaggcagcgtgggcactaggagttgaactcatccccaccaaagcagcatgtactcgcaacctctgagccatctctgcagcacttcataaagccctaaccctgacgtctgggcagttaattttttattgctatgtaatctttagccagcccccagagtctgtctaattggtcagagccctttgggtcagcccctggactgctcaattttgatttgatcaccagggtggtgtggggagggcacaggacagatatgaacccaagatatgaactctgatttcttagatattctgctactgatttcatggatcctagatgatgatcagaaaacctaaaactgcagcttccgtttacctgtaaattgagaacaaacaggactgaaagctacttggcaataataaagaatagaggggctgaagaggtgacttgggggttaagaacactgctgctcttgcagagaacctgggtctgtttcccagcacccacggtagctcacaaccatctgaaactccaatcccagggaatttcccctggccttttctagcctctgccaatactgcattcacatgaacaaaacactcatacatatcaaaattgaatcaataaataaactatatcgatggctcccaagattaaactctagcccccatgtgtgtgcaggtatgcgcggggagtgaagaaaaaaaaaaacaaaaagaagaattttgaggtaaaaggaatttaaattaaatcagaatgagattcccactacacatccaccagaatggatacagcttaaacaaatattaatatcaggtactggtgaggatgtgagactgaaaccggctatacaatggcatagcctcttctgtaaacagtttcatagtttctgaaataactaaacatacattttgccataagatcaacaattctacctcccaaaaaagaaagctttgtgttctctctcaaacttgtattcaagtttactcagcattactcagaacagccaacaggtgaaccaataaaacagtgcttgaatggtaagtaggtaatcacatatacacagaatatacaacgacagaactagtctgtggaacagtatgggtctcactcagtgtggaagggcagctcttgcctgcatggcgccaacaaccaccagcaatccagcacagagatgttatgaagggaatgttatgttatgttaagttgtactgagacaaagcaaagggcccagggagcaacactcataatccaagcagagggaaacaggaggatctggaactcaaaagcagtcagtctagtcacactgcaatgttctggcccagtttaagatgcacagcaatagcctggcatggtggcatatgcctttaatcccagcactggagaagcagaggcaggtgggtctctgtgaatctgaggccagcctggtctacaaagttgagtccaggacagccagggctactacagaaaaaccctgtgtaattttaatgtagttaaaaaaaaaaaaaaatcctttctttttttttttttcccggagacagggtttctctgtgtagtcctggctgttctggaactcactctgtagaccaggctgggaaacaccatacctggcatattttataaaattacagttttgagtaacattgctagtgtagagaaacacaatagacgtgtgtgtgtgtgtgtgtgtgtgtgtgtgtgtgtgtgtgtgcgcgcgcgcgcgtgcgcgtgcacttataaaatctaatcctattaggctcaattttcctagatgcgttcatgtagtttgtttaggatggaatactgtatattgtcatttctcatcaattctcccaatcccagcagggttgacagaggaccttgctgtgtatcttgttttctgagactgggttgaagtaaaaattaagggttctttgggaattcagttatggtggatggtgttttgctggggcaataaaggagtgttttcctgaagtggacacaggtgaaagactaaggtagactaatgaaagaacatttaggtaaaacagacacagaaagaaagactttctgctaaagcaagcacatgaaaggacatgtgatgaaggattctttgctaccaacacacttgttgagattccatagtgaaaaacgcaccgccgggcagtgcatgcctttaatcccagcactagggaggcagagacaggggggtctgagttcaaggccagcctggtctaccttgcaagcttgatgaaatcaagggctacatagagaaaccctgttttaagccccaccccactgtcccccacccccacccccaaaaaaaggctcaagaccagcctggcctacaggagttcgaggccaaccaggaaccaggaataaataattgagacaaaaaaccccacaaaaacaatttttaaaaaggaacttgggccaggtggtagttggcgcacacctttaatcccagcacttgagaggcagaggcagaggcaggcagatttctgagttcgaggtcagcctggtctacaaagtgagttccaggacagccagggctatacagaaaaaccctgtctcgaaaaaaaaaagaaagaaaagaaagaaagatagaaacttggaagctgttgtgcaactcagcaataaagtaagtccttgtcggacatgctttggggtccttgattcaattctcagcaccatacacacacacaccaagttcatgagagggaagatataatatctcacatacctttgtctgtaaaataggggcttaagtaacccagcctagcctaccctaaaagtcactatgaagccaaggatgacctagaatttctaatctacttgcctctacctcccaaacactgggattaaagtgccaatatatcagtttgtttagtactagggctggaactcagggctttgggaatgctgggcacttttatcaattcaagtacatacatccccaactctatcctaaaaattacatgaaatcctaaagaatcttaaaaaaaaaaaaatgaaagaaagaataaaggtggaagatttagatctaatttcaagacaatatctaaactgtgtggggctgggatgaggacacatactgagaaaggacaaacacagaagcatacccatggggttgacatggcaatacacacctggaaaaccagctctcaggagcctgaggcatgcataggcattgagttcaaggccagcttggtctacatgacaagttccactgcagctagactgtctcaaaatataatgcccagcatgtggaagcctacgtgtgtgtacccttccctccctccctccctccctacttacctcttgtgtgtgtgtgtgtgtgtgtgtgtgtgtgtgtgtgtgtgtgaaattctattgataactgatctcctaacattaagaattttaaccctacaaataccaaagtgtggacactttgccccttcttagaattgggaacaaaacacccatggaaggaattacagagacaaagtttggagctgagacaaaaggatggaccatctagagactgccatatccaaggatacatcccataatcagcctccaaacgctgacaccattgcatacacaagcaagattttgctgaaaggaccctgatatagctgtctcttgtgagactacgccagggcctagcaaacacataagtagatgctcacagtcagctattggatggatcacagggcccccaatggaggagctagagaaaatacccaaggagctaaagggatccgcaaccctatagatggaacaacattatgaactaaccagtaccccggagctcatgtctctagctgcatatgtatcaaaagatggcctagttggccatcactggaaagagaggcccattggatttgcaaactttatatgccccagtacaggggaatgccagggccaaaaagtgggagtgggtgggtagggggtgggggagagggtatgggggacttttgggatagcattggaaatgtaaatgaggaaaatacctaatttaaaaaaaaaaagaaaaaaagaaaaaaaaagaattttagcccttccaaaagttattttataagacaggccatagactccaagaaactatttgtaaaaagccaacaaaacttttggctttatgggctggagagatggctctgaggagtgagtactggctgctctggagagaacccaggatcaggcccagaacttacatgctacttcacaactgtttccaactccagttccagggaatcagatgccctcttctggcctctgtgggcaccaggcatgcacttggtgcacagacataaaggtaaatatactcgttaaaaaaaaaaattttttttatttggttttttttttttttttggcttttggcttttggagacagggtttctttgtacaggtctggctgtcctggaacttgatttgtagaccaagctggccttgaactctcaaagatctgcctgcctctacctccctagtgctgagattaaaggcatgcaccacgaccaccaccttccaacctcagaaaaatgtcctcaaaacaaaaaaaaatttaactaatacttgaaactgcatctataagtgtggaaacttttttaaatgtgggggttgggtaggagagttgaggatcaaactcaagaccttgagattgatatgcaaagtacaccaacacaaatctagtttagttttttgtttgttttttccaaacagggtcttctttcctttatcccttcctgctttctattgttcacctatttgagaaaggcagtgaaggtcaaagggtaacttatcggtgtcagttcttcccaccacgtggggtcatcaggcttgccaagtgcaccgagctacctcaccagacaagatcttaatagcatcctaggctgaccttgaactaaagatcctcttgcctcaacctcttctgtttgcttgttaaatttgtctaacttgtttgtcttcgtgtatgtgtgtgtctgtgtatgtgcatgaatatgaataattataaagacagaatagcagagtaaaaagatctaacaaagatgccctggagctggacttagagtagttgtcagtcatcagcagccagaactgaaaatcaagctcaggtgcctgctaccgaggtcataggtgctcaatcagctcagctttcttcttactttttgttaggatttggtttggtttgtttgtcaagccagggttttaatctacaacatacacttgcttcaaattttgatgatcctcctgcctcaacttctcaaatgcagggcttacaggcatgaacccccacacccgacctaggaaaccattttccaactttacacagccacatctacaacagcaaagtccctaaggtcatgggccctgagtcccatcttaatttctaatgaaaatcatttgtaaaatatggtaatactctagtctgggaaagcacacctctgaccctccaaggtaggcaaggtacagggagttgtcctccagaggaatttggctttcctagttgctgtcaaacaggttccaacagcaggggaaactttggctgggataagaagagttgtgtcattaaaacacaactatcagcagagtgtgttggtacaggcaagcagatcaacgccagcctggtctggggttccagggttacacagaccttgtcaaaaacaaaaacaaaaacaaagccctacaactagtcaaataaaagaggacaaaccagcagtggcccataaactcagcactggggttctcctgctacacagcaataaactccagccctggccacaaaagatcctcccacatccccatctcccccactggacagcacacaccacgtaggtccacagcttctagggaaaccttcatagtaagtcagcactaagagctgtggctaagtttacatcatctgacaggaagagctgatgtgaggagttggtggtatacacatgtaatcccagcacttggaaggcagaggcaggaggatcacaagatggaaatccacccattctagatagaagtgccaagccctacaaggccctgtttgaaatataaaaaataaaaacaggagcttggcagggtgtccctatgccatgtcatagggacggtcgggtatacaggagtctcaaaagaaagaacggccctagagagagactgccaaaagcatacagggtattgaactcttcaccaccagaactctcctcaaagtgacaaaggacactgctcccgacagcagcaggaggaaaacactccaggctttcttacgtgtatccttgtcagttgttttgaaactgaggaagggatcctgcggctcttccaaatagcagttaacttccattataaaaaatgtcagtttggaacagattatgagaaacaattgttcttaaataaaataatttagtcttggatttcagttgagcagagagttcgattttcctaagtgatgcctttctctccctccccgggctttctcctctattgtattgaagctctcagatgccagagatggaggaacaataccacaacacagctgcaggcttcctgcctgcccgccagtcattattctcaagaccagaggactttcaaacgctgcttgggttgctttgaaattccctctttcagatttccctccttcatggaccatctactgaaaagaatggcctcaaaaatgtcttactgcaccaaccaaaattctaagcaaactgaaagaaagtcgccagccttgggtatgatgagctacaaatagcttggtaaaaagccagtaaaaatgtacataacaggagggaaaaaatatttctaagcacaggatagattttttttttctcatggatatattaaaccagtttctggggggggggggaatattcaaatttatatcaaaattgtcaacattaaacactgaaatatcaccatcacattttaaaagggggaactaccaagtgtctcaaactatgaaaaggccaaggcgtcccttcttagacattttacaccagaatgaaaggcatttacgcatcttaaagtttccgagaacagaacagattaccagcaatggcctgccgacctggagtctcatttcctctgatcacgttttaaatgtgggacactcagtcaaatcttaccacactgctgagctctcccagtgaagagactcaaacacaggtggttaattttctccccagcagaccatggacttttttttttttttttttcccctttgtccaaaagcattaaatggaagcttggggagtaacagcttgtcaaactggtaaaatgaacagcaacttcccaagttacttgcagaactgaaaaggaccaataacatctgataaatccttactctattacaacaaaatatcagtcccctgaagtttagtgcagtggaattcaacctttacaattaacattcaactgggcatcaggttcatccacgtgaggacagggtggacttctgaagcccttcccgtccagcatctgtgcagcccgggccaggattcccttcccaccattctagggataaccaagaattcagtattacagagaagctcacagccagccgcctctgaccaaggaagtcagacctctcaacgaaacagcagtatagaatagtctgccaaaaagtcacaccttttcttgaatccatcacagagaagcaaaacagaacacagataactacctggggtggggaagatactagctcatttgctctgagaacttttttttttccaagatatatttggtgagactccttaccctgcctgtagcccacatgactatggtatggttagttaactaagcctttataactacccactgtaaactgacctagacagcaattcctaccaagctaaatgaatgccgacaaactggcaactccatttgcaggccaagcagattatctagtgtgtgatgagccagcctcactgactcctgctgagcatcttcgggaccttttcctgttctttaacaactttccaacagagataggaaaagcaaaggtgataaatcaagtcaattccatcatttgttgggagatcgaaaacaggttagagctgtgaactgaataaatatggtcttaggccaacaacaacaacaacaaacccagaagccccctcaggaaacaatggatacatatttacctaacagtaactaaggatcctccaggtccaccgaggtcctcctccacactaccaattctcccaacatgtgctcaaggtgagcgccacatttcactgcagcaccacgtctcagaactccctgcaacccagtcacatcctttccaacactagagaaatcactgtgtggttcccagagctctagccagtgaatacagcagagattacaccatgctcctaggtatatattgtggcccaaaccagctggttcagcgatcccttgctcaatggatggcaggcaacaagaacaactcttgtttttccaatcccaggaagtctcagcagagtaagggggtattaaatgtggccaatttgctatgtagacaaactgccactggaggcaatagtcattctaaacttgcaacaacttaaaagtttcaaaagtacatcctctggcagacaattaaaattacagagtttttaaacgcaaagagaaacaaaccctaaagtcaaatacctcaacaaccaattagagacaggacagcagcatttgggtttccctgttttacctaaccctattacccaggctaaaaggcactctgaaatagttctcccacagccgttttcaacttaatacaactactctggagccacacagccatggcacaggagactgggtggaaatgtgctctatgtcagtgcaggtgcgggctttccaaggggtaccccattaatgagatggagggacctaactcaggttgttaggtggtccaaaacccttaaccattgagccatgactctaggccaaagactgaattttgtaatttttttttttgttgttaatagaatgtccctgacatagcaagaagctataatttcaatgattcaaaatgggcttcctggcacatgaactcacaggcacgtgcgtgtacacacacgcacacatacatttaaaaaaaaaaaaagttgttgggattggagaattggctcagtggttagaagagcacttgtttcttttgcaaaaggtcctaggttcaattcccagctcacaaccgtctataactccagctccagggaatcaagcaccttcttctgacctcagcaggcactgtggtatatatgcatgcacagagacaaaaaatatccatgatgcataaagtaataaaataattttaaaataatttgtaatttcattccatttcttgggagacaaatgcagaagcggcactataagtccatgccagcctggtctacacagtgagttacaggccagccaggaatacagtaagatctgttctcagggagaaaaaaaaaaaaatgcaaataaaaacatggatcatgcccggcgtggtggcacacgcctttaattccagcacttgggaggcagaggcagggggatctgatttcaaggccagcctggtctaccttgcaaggttgatgaaatcggggggtacatagagaaaagaaaccctgttttaagccccagccactcccccccaaaaaagaaaaaaaaaggttcaagaccagcctgacctacaggagttccaggccaaccaggaactgttttttgagacacaaaaaaaaaaaaaaaaccacaaaaacaatttttaaaaaggaacttgggccaggcggtggtagagcacgcctttaatcccagcacttggggggcagaagcaagcagatttctgagttccaggccagcctggtctacaaagtgagttcaaggacagccagggctacacagagaaaccctgtctcaaaaacaaaaacaaacaaacaaacaaaaagaatgcattcatggggctagagagatggcacatcggttaagagcatggctgctcttccaggtcctgagttccagtcccagcacccacacggcagctcacggccatctataaagggaactgacgccctcttctggcatgcaagtgtacatgtagcagagcactcatacataaaataaattaaaaaaaaaaaaaaaaaaaacaaatattctttttaaagggcattagtgggggctggagacatggctcagtggtgaagagcactgactgctcctccagaggtcccgaattcaattcccagcaaccacatggtggctcacaactatctgtaatgggatctgaagccttcttctggtgtgtgaagacagctacagtgtactcacatacataaaataaataaataaatattttaaaaaaaaaaaggcgttagtgctagaccacacacacaaaataggggaaggacctgcagaaccaagttggaagctactctggtctatatcataagggaaaaaaaaagataatgaaggccttaatgggctggagattcagttcagttacaaaacacttgccaagcatgcatgaggccttaccttggggctcaatcccagcacccaagaagaaaataagatgttgtaagtaatcacttcaaacaagtattttcttcacacactgcccagagagaggatcccgggcctcagagtgcactccctccttaataaatgagttcatatttactaagagggtggaggtgccctacagaatttttataccagggaaaatgcatcctaaagtcactttcgaagcataatgaaattagctaggggtgtgaatcagcacacatttaaaaaaaatagctcaggggataagagcactggctgctcttgcaggggattcgggaatccaagcaaccacatgatagctcacaactgtccataactcgagtcccaggggattgaaagcctcctcaggcacgaagcacacatatgcgcagacatgtatgcaggcaaacacttatacacataaaatataaattaaaaatttttgttaaagtcagaaaatatttaatataatccctgataacctagcattactatcatgctggggttttttctaagattatttcctaatgtatgtgtgcctacatgagttctatgtcctccacatatacgcaagagactgtggaagccagaagagagcatgaactgagacagccagaactgaagttacagatgggtgagcagcctcgtgggtgctggcaagggaaccaaagtcctcctgaaaaccagtaaggtctcgtaaccactcagtaactgtaatgaactgttagtattttttaaatattacttatttttattttatgtatatgactgttcactatatgtatgtatgtgcagcgtgtacagaagcctggggaagacataagggcactggatgccacagagcttattaagtttgaataggttgtgaccatgtggggactaagaaccaaacctgggtcctatgagaagctgcatgggctcttacccccggggccatctctccaactcctctggagtaatttttaaaatcattctagcaaaacaaagtggaacaagccttcattctcacttgagaaactgaaacaggaggctgagttcaattgaggccaacctagctgctaaactaattaacttcatgattcagaggcttacaaaaggtaataaataatcctgaggtgtcataagtctctaatcccagcatctgaagggcgaggcaggaagatcacgagttcaagaccaaccagaaatataagctccgggttccacacgggcctgagcatctcaaaacaccaaagacgggatggagagatgccgggttccacacgggcctgagcatctcaaaacaccaaagacgggatggagagatggtggcgtagtggtttaaagcacttgctacactttcagaggaccagggttcgaatatcagcatgtacatggcagctcactatttgtaactgaattccaaggaatctaacattctctcctggcctccacagacacaaggcacaggcaagatgcggtgtaccaaccaacatacacacaggcaaaacacacatacatgtaaatttggggaactggctatatagttcagtggttaggagcactggctgtgcctacagagcacctcggtttgattcccaacaccctcatgatggcttttgtttgttttgcttttattttttttgaaacagggtttctctgtatagcactggctatcattctgtagaccaggccggcttcagagatacatctatttctgccaccagaatcctgagattaaaggcatacaacattatgtatgccctactcacaaagcatccttaaattcagttccagggatctgacagaagggattctcttctgaccttttaagcaataaggatgcacatgatgctcagacatacatatagacaaaatactcacacacataaaaataaaataatctttaaaaaagacaatcttgattatatgctgaagtttgtgttttgaagtcctctttaaagggtgttttctgatgaaaatgtcctccgtaactgcttacaattagagctgccccttttgcctacaatccccagctataaaatgtacttccttctatatgctgaaagctagcatgtgcctttttgttttttaatgctgattggacaattaagtcttttctatcaacatataaaatactctataatttgggatcacaggcagtttagattactgctcatttaaattcagaacctgaagctacctccagcaacacaggagctacagtggtcggtatcactttacatgttacaaacagaggcttcatcttacaatgaagcctcagggttctacatcccacagactattatttctttaagggttttaatacagcaaacagcagtagcactaaattcaacagcctaacaactattgagattttttaaattcatgtcaatcagtgcactaggtggatgcctgatgtccacagaggccagaagagggcgaccgatcccctggaactggagccatagatggttgctggatgctgcgggtcaataccaggtcctctagtagagcagtaaccaatgttcttaaagctctgagccatctctccagctcctgcaagtttaaaatagcaaaaaaagaaaacactacccctccccagcccccgttcctgctctcagtatataccagctggggtttgtttctaatgaaaatactttagtctttagttccaaagccaaacttactgcaagaaatgctaacagtcattgccacagacagggtttctagtggaagagattcctttttcagtattttcagaccttttcagttgggtatccgatgtggaaaaaacctattctgaatacttgataaccatttaaggttttaaaagaacaaacggctcacaaactcagaggtttgcactgccctgttagtccacagccgtatctgctgaagatctgaatgcatgcacccttagctccagcaactcatttctgcaacaacctgcaggaacaaatgctgaggctttggcgcagcagagatctgtcaaccaagccgagggtccccgacatttaaatctcagtccagaaaccctgatacaggacctctcatcttattcgtccacctagcccttcagcagacaggggactgactcgccttcctggtttttaacctcacaagcttaattacaaaaacaagttggctttgaagcgctactcagaaactgcaaccaaaaaaaaaaaaaaaggaagtcttcgcatttgggagggggaaaaagtttctcgacttaaagacactttccaaccttccagtgtcatacagtgtggagtcctaggctcctgctccgcgggcctacgatgctctggcctctccgagctgctctcctgcttaacttttccaccctagccaccctcaagctgcctagggaagtagcactgcctcccacttcatttaaactactgcaaacagaatcaatgaacgaacctagactgggaatttcagaagatgaaagcgacctcgatgatagccgacacaagacggcagagcccctatccacgccgcacagagagggagagaccccacactcatcccatacagacggccgaccctgcatccacgctacacacacctcggactcctcatccgccaagcatccaccctggagacatcgcggaccccgcatccacccggtcctcgccccgcacagaccgcagaccttgcactcacccctcgcacctccactcacccggcacacaccagcacacacctcgcacaccgcactcagctccctcgcccagcatccaccctgcagacccccacacgcagcctgcatccaccccacacacctggcggactccggggccacccaacacacctggcacaacccgcagacccccacatccatgccacacaccccgcacacgccacagaccccactctcaccccgcacacaccccgcgggcaccgcacactccgtgtccgccgcgcccgctcgcagcggagccgcagcttcggccggaggagccgcccgtgtccgctccgccgggcggcgccggcgggaagaggagactcggctgagcttctccgacccgagattcggcggggggagccccagcggcaagcagaggccgcggccgcgaactcctcgcgaccctgcacgggccccggagcccagcgccgcccgcgcgatccctgtcgcctgcgccgcgcgttactggcgaccccaggacccccgcctcaggccatgccgccggcctcgcccgccgctcgccactgcctttctctccactcaccgctcgccgccatcttccccaacgctgttctcgatcggaaactcacagctcagccccggccgccgacaccgactccgccgaggccgccgccggcgctctgaggagctgaggcagccgccgctgaagccgcggcgcgggggccgccgggatttgtagtcccgcggccacgcccagcactacgggtcccagggggccgtgcgcgaggcagggggcgtggccgcgaggcctgggttcccctcagctcacccagccgctggaggtgaagaggacgttctgggttcgttttcccgtttgcctgtctccatcctggaattcctgacttcaatggagtgttcattgtgcgccaagcaccgtcccacaagaccagtagctgagggggcgttgtccttacttttcagaggagcaaactgaggcccgaggtcaggagccctgctaagtcactgacttgaaaaggtttcgggccttgcggtgatggcacacgcctttaatcccagcactcaggaggcagaggcaggcggatttctgagttcgaggccagcctgatctacaaagtgagttccaggacagccagggctatacagaaaccctgtctcgaaggaaaaaaaaaggttttggctcacaaggtgttggtcctcaggtttggtctctgcgtattgtgatttaaaccagagaacagcttgctttacagtgggaattactgagagacagcaccttaaccaagaacatcttaaactcggtgccaccaaaggtgactcaaactgtcacgccatgtccccgataggatgcagtgcagaaagcagaaaactaccaagttaagtgacctgaatctaacggaataggaaaataaataaataaataattttttaaaaaattaaagcgcagaatgtgcagcattctacagaaccagcctctcctccaagaaaaccgatggtagcaagtgaaggcaatcccagtgaccccatggctccggggcagaaacagaagaaacaaaaactcaaagtcctccttcaaagcagggatttaaagccaagttggggatgggggtgaggggagtctgaccaaaataaataaggccaaagttaaattcaataaatgtaggccaggctagactccagtttagaaacctggctgcctctgcctccctagtgctggattaaaggcatgcactagcaaccccggtttatggatagttcttaggtaaaaagaacttgtaaaggaatttggagttaatgggaaaaaatagaggacgtcttgggacacaactgtataaaatgtcttcagtgtgaataagactaaccctatcctgaggttctgctgtcacctcaaggatttcccacctgcactactttactgttctgcaagtgtccactgtttacccttggagttattcccacagcagccaagtcccaaacctggtgtggtggtgcacacccttaatccctgtactcagaaggcagaggcaagtggatctctgagttccaggccatccagggctacatagagaaatctaatcttaaaactaaaaatagtaataataattctaaatgtaacaaaagtacattaaaataaataattactgattcaagcacagtactgtactaaaattttatccatattcagacatatacataatctttatatatgtatatgttgagagcataacagatatgaacagtaaaaaaataattcaattgtttcagtaaaagatccaaaaagaaggcagacatgccgctgctttgggtggggtaagcaggtgaccctgcaacagcatctggccggtgctagagccaaaatttaaagtagctgattgacttgctcaggtagataatcagcgaagatgctgccttcatccttcatccttccctgtttgcccagaccactcctccatgaagggattgacttgtgtcccttcttcgaattaggcttggttctaagactgttgccccaaggaaacacaagtcacaggcctagagcttgagaatgctgccagctcctacttcctccttcctggccccaactctagctctatgagaatccagagggaaaggaagcaccagttgacagaggctgaggtcccaggcaagacccaacagcagctgccagccctgcacacagccttcttgtacgtccctgtcctttgagggccccagtgcttacatcaccaacaagattagcaccagagctaggcctggtaggacacacctgtaatccttccatttaggaggtaaaaggacaaaggttatcctccactatgtctgaaatcccaggccagcctacacatggtatcctgcaatcccaggactcaggaggctgaggcaacaggattgtcaagaggacggggccaggcatgcagggccacccaataagagcctactggaaggaagaaagatggagggagaaagggaggaagagagaaaaactagttcaaattccaaaaaggaatgtattctactggccacattccatgttgtagatgtaaagaacagaccaccagggtgacttttaaaaacctaaggaatacaacttgtcgatcacttgactgagatgaaatataaaaccatcacagaaggccagcacatgggtcagcagatatagtcccttgccatcaggcctgaagagtgaggtctcagaacagaaggagagaaccaaatcccccgaaagctatcttccatcctgtaccatgtcatgccccaccctcctccagaaaataaaggtgatcataattctataagctggtgggcttccctacaatttactctcaaatgtctcaaagggaaaaaaaagtgctggatggtggcaagggcatgtgggggcaaatgtggcattgtgaatagattttcttttagaacactatgtgggctaattggttttgagggtttttgtttttgggttttgttttgttttttgttttttggttttttttttgttttttttgttttttgtttttggcaatttgacacaaactagagccatctggaaagaggacaagtgagaaaaggctttcatcacactgacctgtagacagatctgtgtctcattttcttgattaatggttggtgtggcaggcctaggccctgtaagggcagtgccatccccaaacaagcagttctggggtgaacaacccagtaggtagtgtttctccatgtcctctgcttcagttcctgccttggcttcctcggtgatggaaatcaacccttttggtcctggtgttgatcccagcaaatgaaagccaactacagacagatacacaggcctttgcagctttgggtgctaggattgaaccagagccttatgcaagctacgtactcgctctagcattttgagctgtaccctcaacccatgtttctcatagactttcagattttctgtagactcggaacatttccaaagtaggaaagttggttgttgtgggacagggaggactcagaactcacagagcacttatatgttccaagtactttgggggtttatttttgttttcttaatgggtttgttttgttttgtcttgctttttgttttattttgaggctgggtcttaagctgccgcccaagctggctgcaaactcacagccgtcctcctgggatctggagggcagcagcacacccagcttttcaagagctttttgtacttcctcgcccccattcatgtcatcgctgcacgaatgctgatcacaccccatttcagagaggagtaaatggaggcttgaacaagtcagtcacttgaccaaggacagacacctggccaaacccccaggctcttccacgtcacacctcttcacctctgcacaagtgacagagatctctaacagtcttctggactggagaatccctggaggtagctcaggtcttgaccttttgactaaaatcaagagtagcaatggggcaggaggtgatggcacgccactttagttccagctctcaggagatagaggcaggaagatctaagttctaggccagcctggttcacagagtgaattc

SEQ ID NO: 25 - DNA, 29 bp, Artificial Sequence
  synthetic primer
gaaaagaggcagattcacgtcgtttccag

SEQ ID NO: 26 - DNA, 28 bp, Artificial Sequence
  synthetic primer
atctggtgcttcttttgggatgcgggag

What is claimed is:

1. An isolated polypeptide having glucosamine-6-sulfatase activity.

2. The polypeptide according to claim 1, wherein said sulfatase is a human sulfatase.

3. The polypeptide according to claim 1, wherein said sulfatase comprises an amino acid sequence set forth in any one of SEQ ID NO: 03, 06, 09, 12, 15, and 18.

4. An isolated polynucleotide comprising a nucleotide sequence encoding a sulfatase having glucosamine-6-sulfatasc activity.

5. The polynucleotide according to claim 4, wherein said polynucleotide comprises a nucleotide sequence that encodes a polypeptide comprising an amino acid sequence set forth in any one of SEQ ID NO: 03, 06, 09, 12, 15, and 18.

6. An expression cassette comprising a transcriptional initiation region functional in an expression host, a nucleic acid having a nucleotide sequence according to claim 4 under the transcriptional regulation of said transcriptional initiation region, and a transcriptional termination region functional in said expression host.

7. A cell comprising an expression cassette according to claim 6 as part of an extrachromosomal element or integrated into the genome of a host cell as a result of introduction of said expression cassette into said host cell, or the cellular progeny thereof.

8. A method of producing a sulfatase, said method comprising:
growing a cell according to claim 7, whereby said sulfatase is produced by said cell; and
isolating said sulfatase substantially free of other proteins.

9. A monoclonal antibody binding specifically to a sulfatase.

10. A method of identifying an agent that inhibits an enzymatic activity of a sulfatase, the method comprising:.
a) contacting a sulfatase according to claim 1 with a test agent and a substrate for the sulfatase; and
b) determining the effect, if any, on glucosamine-6-sulfatase activity of the sulfatase.

11. The method according to claim 10, wherein the substrate is 4-methylumbelliferyl sulfate, and said determining is by measuring the amount of 4-methylumbelliferone reaction product produced.

12. A method of reducing tumor-induced angiogenesis in an individual having a tumor, the method comprising:
administering to the individual an effective amount of an agent that inhibits enzymatic activity of a sulfatase that releases an angiogenic factor from its association with extracellular matrix, thereby reducing angiogenesis.

13. The method according to claim 12, wherein said reduction in angiogenesis results in a reduction in tumor growth.

14. The method according to claim 12, wherein said administering is at or near the site of the tumor.

15. A method of treating an ischemic condition in an individual, the method comprising administering an effective amount of a sulfatase polypeptide according to claim 1 to the individual, wherein the sulfatase polypeptide increases angiogenesis, thereby treating the ischemic condition.

16. A method of detecting the presence of a cancerous cell in a tissue, the method comprising:
determining the level of an mRNA in a host tissue sample comprising a sequence that encodes a sulfatase according to claim 1; and
comparing the level of said mRNA in said host tissue sample to a control value, wherein an elevated level of sulfatase mRNA in a cell in the tissue sample, compared to a control, indicates the presence of a cancerous cell in the tissue.

17. The method of claim 16, wherein said determining is by amplifying a cDNA copy of the mRNA using specific primer oligonucleotides and a DNA polymerase.

18. A method of reducing tumor growth in an individual having a tumor, the method comprising:
administering to the individual an effective amount of an agent that inhibits enzymatic activity of a sulfatase according to claim 1, wherein said sulfatase releases a growth factor from extracellular matrix, and wherein inhibition of enzymatic activity of said sulfatase reduces tumor growth.

19. The method of claim 18, wherein said administering is at or near the site of the tumor.

20. A method of detecting the presence of a cancerous cell in an individual, the method comprising:
determining the level of a sulfatase polypeptide according to claim 1 in a biological sample from said individual; and
comparing the level of said polypeptide in said sample to a control value, wherein an elevated level of said sulfatase in the biological sample, compared to a control, indicates the presence of a cancerous cell in said individual.

21. The method according to claim 20, wherein said determining is by contacting said sample with an antibody specific for said sulfatase polypeptide.

22. The method according to claim 20, wherein said determining is by contacting said sample with a substrate for said sulfatase, such that a detectable product is produced in the presence of said sulfatase.
